United States Patent Application Publication US 2005/0130172 A1 - sequence listing, part 3

SEQ ID NO: 96 - DNA, 31377 bp, Homo sapiens
agtgtcattctgttgcccaggttggagtgcagtggtgtgatctcggctcaccgcaacctctgcctcccaggttcaagtaattctcctgcctcagcctctcaagtagctgggattacagacatgcaccaccacacctggctaatttttgtatttctagtagagatggggtttcactgtgttggccaggttgggcttgaactcccgacctcaggtggtccacccaccttgacctcccaaactgctgggattacacatgtgagccaccatggccaaaaattagtattcaaaaaatattatcctgcatcttaagtaagttgaatatgaagccatgggaactgagagaacaggttgtttctaaagagaaattatcccaagaaaagaaggaaaaagtgagaaagaattaagagatggattgggaacattattttattagaaaatcagtgaccattcctacttttatgacccatgtcccaccagtgtttgcttgatgggaatttttagggatgagatacattgctatgttactactctatatgtgaataaccggtgtgcctgatttctagcacattaatggattttataactcaataaattataggcactcaataatttttattaaatgagtgaatgataaaaagcagtggacataactggatatattaaagcagcatggggctatatgagaggaggagtttcataagatcaagattaaaaattaatttgatatatatattttttgcttaagtggtgtttactagtctaaggaccagtacacatacattagagaatgtattcattaagaagtctcagccaggcacttaattgttgacacaggaaaaaaaaaaaaaagccaacaaaccaactccgcagagctgtgttaaaaatactggactttcatcccttgattggaggtattattacagcatcaagctgacctgcaatatggatcattgagatcaaaggctataaattataatgtttgcctttaaagaagtcaattcaaccctgaatgtcatagttagctactttcaactggaagctacaacatggatttatggaatctgtcttggtttctgttcttggatgctcttctcgtgatttctggcttggtaaggaaacagtatatagaagataatttaaaaattttggggcagttgatattgattgttaaagaacaagtgttttttttttgtttgttttttatacatcttgaaatgttgatctcaaatgagtgtttcttcttggagattaggggtgggcagtgtgtagggagtgacaaatagccacaccagagtagagacattgatataaagttatgttttcctttcagtttcatcattgtgtaacaagttttcttttgatgagattataaatgtgtattttgaaaatcattccatttttactgctgaatgaaatgcagattgctgcacagtaacttgagacatgaatgagtgtcacaggcaccgtcagtacttacaaagttttataacgtggtatttctcttatgcttcttcatcagtttagactcatccttctacagtttggactaatcttttctatcaggtagtttgtatcacaaaccaacccaaggttttaaatgaagtttcaaatggctagtggaaaaccttcagttgttattttaaaataacaattattatattggggtgatattctatgaataggaactagaacattgcaaacaagagatacagatgaatacatgttaaagtgtaattaggaataaatccttgataattttattctgtaggtgcactggcattcctctatgagtgtatgcctgtgtgtggttatagtgtgaaacatgcaaagcacttgttaatgtcaaaaatgatggtaaccatccatccagttcattcccacattttgttaaacgctccaaatgattctagtatttagatatgtaagctgtatttgaataaaattgtactttacacttttgtgacaatttattatagcttacaatgagccttctttcacattatatactgtaaccctcacaatacccatgcaaagcaggtactgaccatatcttatggatagtctgagtacctggaaggtgaactgaattacccttagttagtagaactggtaacataacccagacagtcctatgagctttttaattcaatcacactaagacatttctcaggtttacttagttgttttttttttttttcctttggacatgtagtctgagtttcattgaccatttgtggagaatctattttcagaaaaaaaattaatcacaaaatgtacccattgtttttcttaaatatttgtattgtctttgaaggcagaattattctgggagaaacatgaatgcaaaataacttgattaatgagtcttgaataacatttctttttaaagaattgttataaattacagtattatttcaacattgagaataaattatttggtttttcaaacattgctccatgaatgctttagaaaatcgtgtgtaaagtgagcacttatttgagagctagagtcttatgttctgccttttcccccccaatttttgaagttggtttcttgtttccttcaccttcaaattgatttaacaggcagtttcattttccatatgaaatgagaagaccctttggtcaaaaagtcatcttaaacttcaatttagccatcctaaatacatgtcaggaagtaatccataatattaatgacaaaacaaacaaacaacaaatggttagatataaactgaatccaagaagaccattcctgggcattataataatatgttttgtttatgtgtttatttcccaggcaactccagaaaactttggtgagtctattttgagttttgttctaggttatagagaacctaggacatatttaatgctaaacatcatacataattacatatgcataattgatgcataattgcattgaactttgatctaatactggattcttttgatttatggagggacattttattgtccatgttccaggcttcatatgcccagcaaagaaatagatggtataggaaaggccaagcacagtgactgacacatagacatcccataaatgcttgctattattgtttttgttattttgtgtcaaatcagatggacctaataataacagtctactcagtattcacttgcatactcggagatttggccatattatatacacctttacaacttaaaatagtaattcaagtttaacttaagaattttgcttgaaagttccaaggtatactactagcaagtgatatacatgtatgagtagattgggctagtttgaccaaatttaatcatttgtttgctatttaatctagtcttctagtctttcaaattatgcttaataatatatggagcaaccaatttcttattcccgaagtcatttgacattcaaggaatgtcgataggacagaatacatacataaaagctctttagagcccaacctggctcataggagattcttaatcaatcaatcaatcaatcaatgtatgttgagtctgaatctagtagtcacctgaggccaaaagaaacttgcttagttctgattatataaatgataaaggttttctccttttataaacataatgttcaattttttgttgttgttgttttaatcaaagatgtagatggcggaatggaccaggacatatttgatatcaatgaaggtttgtggattttttttacataatctcttaagtagagagtttgaatccaatttgctaacatgaatttttatctttactcttaggtttgggactggatctttttgagggtgacatcagacttgatagggtgagttgaaacagtataaggaagaatcttccattaaccactgcaagccaaattcagagtaactgagaaagattagacagcatgaactttgttaagcctaactatctctaagggtgcagaatcatggtgacacatttattcaatgaatatattatactcaaagaaatgcatataattgtgtcttcatctttcattactcatatttctgtgtggttcaagccaccataactcattacatatgtcttagtcttattgatttgattgattttcattattggagcaatatgacatttgattttaaaataggacctcacagattcaatctagtggaggcaaaattaaactgaatttgtaaacatcttcaatgaatcaggctttttaccccaataaatagattttgtgacttctaccctggccttagctaaaaataatgttgccaagttaagaccctcccaaacctattcataaagagtgctgattctcatctaagtcatcatgccacacagataaacacaagaaccttgcaggtagattagggggactaaaaagttcactatcatgaaagcactgtttttttcagtgttctctcacagcatggaaataagcactatttttcaaaagacaagatatagtttattgcccactagattgaaaaatattaagaaacttactacttactatcccttttggtgatgatagagagaaactaggatgcttgtttaggaatgtgtttagaacatgttattatactggagagtgtataaatttgaaaaaaagaaagaaggcaatttgagaagagctagcatagtttaaaatatatacaccatgtggcctagaaattacccagtagatcttttcctgtaaaattctgctcttccttccaacacagtcctaagtcactcccttacttcctatatcgtaagcaccaacatccctcacagtcctcccacccccaggaaacagagctgcagtctcccaggcttagtcctgagcctactcttctatctgtgctctctcttgatctcaccttcgtccagggattcaaatgtcatctccatgccaatgaatccaaaggcatatctctggtcctctcctttccctgagctccagactggtctatccaagcactaatttgccagctccacttgaatgtctacaagacgtctcaaacctaaggtgtcctctgatcaggtgaactctgaccttccccccaaactgttcctccccactctcctgtcttcataaagtcatcctcacaacctgactctactcaactgaacacataaaaaccttgagcgccacctttgcttctcctctctccttcactccccatccagcccgtcagcaagttctatcatttctagctctaacatacactgcaaatcgtccacttttctccatcactctaattcaggccccatcatctcttgcctggctttttccattagcctcctaatttgtctttctatttcagatattgttcccctataatcttttccaccctgttacttgtccttatctctcacagcaaagtcatttttcaaacaggcagtgacttcatttcacctcctggcttgaaactcttccatagttgcctatgggtttagaatcatctcccgatttagtcccagctgtctaagcctagcatgccttagctcctgcttctgtcctcccctcttccctcccctctcctctcttttcctctcctcttatctcatccacgttctctcttagactcatcaggctactggtctcaacacatattcaaaacatcccaggcatattcccacctcagaacaagaacaactaatgttccctctgcctgaaaccaccttcccaggacccctttcaatgctggctctgtcttgcgatccctatttccccttaaatatcatcccttcatagacgactgtcctgatcactccatctcatgtactccgtcatccctgtgcccttgttcacatctctctttctaatttcctccctattgcattcatcctgcttaaacatttttttttttacatactctttctgtcctccactagatataagctccatgaagccagagacctttattaccaaggaatctctattctctaggacaatattcaatttgtggactgagtaaatacattagtaaaatattactcattttctattatacagtttaaaatcctttaaaaatttttgaaaactttggcccagctcatgtgtgactttttctgatattgtgagatccagattatcaaggtcttgctatcactgttttcttgcaaatttttaatctttaagtgtaggaaactaacctataaatctaccaatatttgtagttcagttttccaacagttattttttgcattattccttcttcaactgtattaacaaaatgatagaaattagtaatttcttcctagaaactttgttatattatgataaaagtagggctacacacacacacacacacacacacacaatttgtttgtgcgaactgggagagctttaaacttcatttatttctagattaactacaggtttcctaagtgtttgccttatttgtttaactagcccttttgcatttatttttgacaggcacaaattagaaattccatcattggagaaaagtatagatggcctcataccattccatatgttctagaagatagcttgggttagtatgcaccttgaagtatccataactaatgtctatttctgacaaaatatgattatagtgtttcaaagggtgggcttatatagtctttaaggttttgtttggtttgctcctttgtgtggctatgtacatttactttgaaaaaaaaaataagcaaaacgaacaatgaaagtaacctaaatgactctgtctgaaatatttacagtgtcttgaccaacaaagcaatgagttcaaccaacgtttatggagagcctactctgttatgctagggacataacgattagggagccagtctttttttgtgggggaggggctctgcatcatatattcattgaaccagtgcaaaaacatcttttggagagcagacaggccaggccagggtcccaggaggatgctctgctgggggtgcagtgagggtgaaacatggaagaagagggccttgcttcctcttcccatggcaggtatgctcctttctcctagagtctggatccctggtgagtgaggccactgactgactgtccatctgcctgtccctctctatccctgcaagttcggggaagaagggtcattggcagcccggggctgggaacccaggtcctctggtgcccccgctggctcgggctcggtggccttgggctccttggcctcatccctgtttctgctggccttctggagctggtgtcactgcgccacctcggctttcagactctccaagtctttttggctgagaggaatgaagaggatgccattgatgcctttgaactgctccaagacgctggccatgctgggggctgtgaagttgaggggcgggatgttgttgctggagccgttgcggtagatctcatgcatggcgcgccgcagggccacggccagctgggtcaggcacttgaggtactcagagctctccttggtcttctcctggtcctcgcccagctgggtcttacagagggtgtgcagccagcccttccttctggtgctgcagggccgaccggaaactcagctttgctctcatagaccgaggtgatgaggtggtggccaagggccaccttgagagctttgggcccttggtacttggtgctgacggccagcgcgttgtccaggaagcacagcgacaggtcgtactccatcaccctgtgcagcacccgcctgatgttgtccagcacgccacctcggggtgtcttccccaagcaccagcgcatgaggtagtgggcgccctgcagcaggctgagggccagggacagctgcctgctggtgaagcagtgcagggccaggtgcatgttttcctggatggtgttggggtgctcgatgcccatcacccgcacgctcatcagcactgccttctgctggcttctcagggcctctgcgtacttgcccatgatgtagtggaggcgggcaaggaggcgcaggcaggctcagatctccacgtgcactgctccctacacttggttaaacaggtgcagggcctgattgatgggctcacagggagccagtctttattttaaagcagtggtttaccctatgatcaattatacatatgagaaaatacataaaataaccaactaaatttgaggaactggcattgttttatcaacattttattttgccaggtcaggaacttaaacaacaacctaacatgataaaagagctttcatcatcctcttttcatacagtaaataatgttattagtgtagtattaaaatgttaaaaagtcagaagaatcaaatccaaaactaagaacagcttttctatagaagaaatttaaatatgttggaaaactctaaacatggtcttcattttaatctatggactagtggcaatgatgccactgaccagcattagcttagaaattgctgtttgggaaaagtttgagtaaaaaccctgctatagttttttaatttttaattttatttttcatttttgtttttttttttttgttttgagacagagtcttgctctggaatgcagtggcacaatctcaggctggagtgcagtggcataatctcggctcactgcagcttctacctcccaggttttggcgattctcctgcctcagcttcccgagtagctgagattataggcatgtgctagcacacctggctaatttttgtatttttagtagagatgggctttcaccatgtcgtacaggctggtctcgaattcctggcctcaagtgatctgcctgccttggcttcccaaagtgctgggattacaggtatgagccactgcacccagcctgttatagttttttaaaatttcaacttttattttagattcagtgggtacgtgtgcaggtttgttacatgggtgtgttgcatgatgctgaagttaggggtacaaatgaacccatcacccaggagttgagcatagcacccaataggtggcttcttcaacccttttctccctccctttcccctcttgtagtccccagtgtcttttgttctcatctttacatccatgtctatgcaatatttagctcccacttatgggaaaacatatggtatttggaaaccctgctatttttcttaaagatcatgcatttcagtggagactcacataaatcaaaagtgaattatgatagaatggaataaacattatgattagtgatgtgttcaaagagctatgggagcacattggaggggcagtaaactcaacctggatagaaaagcatatgcattataagcagaggacgctatatagcaggactgccatgaagactgtgtaagttgtacaccgtacaactgacatgacctcctggagctggtgctgccatgccacctcagctttcagattctccaagactttttgactgagagaaatgaatgaagaatgccattaatgatgtagagctgcttcaagaggctgctctcaggtggctgggccaggaaacaagtggagctgataccaggtttacgttctttctgttcaccaggaggcatttgtttctttgtgtgaaagtgctgttcacccatctggccagccagcaactgcagcacctgctcagaggtagtgcctcttcctaattggcacacaggcaccatgtgggctagtgtggcctctgatagcaagggaagggtgctttagccagatgcatcacgatctgctaagtcctgaagaagggagaaaatcctgagctggaatttagattgagagtggggagctaggaagttgagcaggtaggcggaacgcaaatggggaaggacttgggtcttcccggtgttaaagaacttgtcgtgtatactaataacatggggccaccaaaagtattattgtggaagtgagattgttaaaattgcagtttaaaataatcacttgggttgaagtatagaagatgtgtcattagtggggtaaaaagaagatagggagaccagttagaaaactactgaggaaattcagagaaagaattaagagattcctaaccaagataaatctaaaagctatttgggatgcatttgttagatttagtgattgactgtaagaggtcaagaagaaggtgggtgtagagaaagagattctagtgctcaggattcagtcctgggtagctgagggcatggtaacgtcttcaacaagaatggagaatttaaccttgaggagcatgagacagagaagcatggtggaaattagtttttggcatgcagaatttgaaatgcatcagagtcactgtggtggagataccaaataaattcttggtatatgacctggtcattcaaggtcgagaaatgtttgggagttattaggatgtaagagatggttgaagccgtgagtatggatgagcatttcacacagtgccttgcatagagcaggtgctccatagataactggattttattgatttatcctggaaggttgtgttgaataagtaagaagatggtcgagaatgaaactcagtgccattttttggaactggtatagaaggaagatctagtggaagttattgagaagggggaattggccagaaacatagataaaaaactaacagtagggtagggaaagccagggcaggagtagttagcggggttggaagccataaagagcacagggggcatgaggagagaaagatgttcattgacttttggaattaggaacctgaaagattttgaatatacatgtttttttggtttagtcttttgattaaaaaatttttaagttcttttgttttaattcttcctttttttcctttcgttcgttccttccttccttccttccttccttccttccttccttccttctttcttttttgagacgagttctcactctatcacccaggcttcaacctctgcctcccaggctcaaatgatcctcccacctcagccttccaagtatctgggaccacagatgcatgccaccatgtccagctaattttttgtatttttggtagagatggggtttcaccaggcaatccacccacctcggcctcccgaagtgttgggattacaggcgtgagccaccacatccagttatatttctttttttaaaaaacttattctcctaagtatgttccatgaaagattagggagctttaattttatatatatcttaggctattttttttttgccatgtatttaaccatgagctttatttattttttaaacaacattataaacaacataatgaatgccttgaggataagagctatttttcatcttgcaaattggaggattaccatagtctctggcgtattatatgtaataacatttttgaaataaattgataagcatatgtatatatataaatgaaaaatgttaggtaaaaattcagcctagatcctaccatccaaactgtgcacatttttacatagttataactatgatgtcttaaatcttttgttctaattttttcacttaatgttattgcattttttcatattgtatagtctttataatagaatcaaacttcaaatttttatagaacaatttttttcaattatgtgattttgattatttcttatttagaaaatacttttgtttaatattgtagaattcaacttgttttctatgttcaaattaagaaaagtatccttacgtttcagaaatgtataccatcttcaaatgactcagactaagaaaattactaagcaaggccactcttacaggtagcaaaaataaatacctatgaagggttgatttctggaaggccctattactcagattctagtaggtcaaactgtgaaattctaccagtagggttgtagtctttgagcttgaacttcagatgttacctggctggtagatgcaacttccctgaaaggagtaatactcatagcagccatttatagtttccagggcctaagttataattccttgccttagcaccaaggcagaaaaggcagtgggggaggctgagggtaaagagttggggatggaaatgaaggggaaggtgctagaaacctgaaggggctactaaggggaaacaatcctgaacagctgcttactgaactcctaggattgccagcaacttgcctcattttccaaagcctggcatggttccaagtggagctttctgcatctataacgcaaggttaactaaggccctcagtaaataaaggcatatggaaaacaaagatcttatcttggtaaagggcctcagtgtttataaagctttcacgtgttactttatttattaattcaagaaactatcctcattaagttttgataaatggcctaaactagtatgctcttttacattctgtttaaaacagtgatatggtggtcagtattatcataccttatttgaaggaaatattacatttgaaataatgacccaaatatgatacttataggacagaacattttgaacgttaacagccatatgtagatacacacacacacacacacacacacacacacacacggcatactatttcagggtgttcatagaccttcccatctcagcgtcctcggattaaaagcccagctgtgaggctttaaatacatattatagcttctcagattaagtatgtggtggcaatttattttgattgcctgtgatccaatgtccaatggatccaatttgtaatcctctattcattaaaatgataaaaagaataatgatgaaaaaatattttgatgacataatatttagtgaaaaaatagttggtaaaatgctatgtagatgactttattttttatagaaatattaacatatgtatgttatatatgtattcaaaggcaaaatgtatggtaagggtgattgattattcctggatgataggattttaaatttctttttattcatatcaatttttaacttatttataacgatagtgtattacttatgtggtattgtaaaagtctgaacttagtgccttttacaacttatggattttagggtcttccctatgtgaatcctgttcttgatcttcttagacctgcctcaacagaggcataccaagtaatcttccttgaatgtctatgcaatggttactctagaagggagaaaggaaatgaacatttgacaaatgctaattttacttggaacttcacctttactttctcttactatcctcacaatatcctgcaaagttgattttatttcctcacttaactgataataacaccaaagctccaaaggttgattgaattggcaaaagttttatgtcaaaagtgagtggtgaggatagggaagaacttaggtgtgtctggctccaaagtccaagcactttcccctctgccatactgtctcccacctcctggcaggctcccatctttcacgtcactaggacctggcccatgtgatgcctctccatgtgcatctgatacagcccgttcctcctggtcactcacaagtttcttttcctgcatgttgtttcttccacacctctgccttctttgagctccatatccatatcactcttatatccagagcattggctcttacccttattttgggccctgaactcacttgcagacctcatgaaagctctctctagaaaatgcactttgcatttgtagatatgcacacacacacatacacactttgcatactatttcagggtattcatagactctcccatctgaagatcctcagattaaaagcccagctgtgtggctttaaatacatattatggcttctcagatgaagtacgtgatggtgattatttattttgattgcctgtgatccaatggatatgttctctgaggtaaagatgcatttttattgtttagtaatgcaccattagtgagtgagtgctagagaaatataaggccaaataagggatctgaagaataagcagatactgtatatgatattcaatgggtactgaattctaatttttgtaaaaataaaagactcaacattcatgaagggactaactcatgataagcaatatattgcagtggcctgcttccatggaagatttttcagtggtgattgttttaataagcttatttttgtttgttttcttccttcagaaatgaatgctaagggagttatcctcaatgcatttgaacgttatcgccttaaaacatgtattgactttaagccttgggctggagaaacaaactatatatcagtgttcaagggcagtgggtaagttgcagacttagtcttctaaggcatctaaggagaactctagtgcctgggacattacattgcagcaatcatcctaggctctgacctttaggaaggggtggggactttcttgctagttgctggagagtaaaaaacaactggatctagtttttgtagacatagaaattatattcccatacatgtaaccgcctttagacaaagtggaaagtggatgggattgcatgccatcagacccacaaccttgtgaatttcagcccgtttgtaatttacatactctttatccctttcaagtaaaaaacatgtgtatttatgtgtgtccatgtctgtgcttaagcttattttaacctaaccactcttatttcttgggttaagaaggcgacagtattatttgtcttgagctcagcaattctgagtggttgctgtccctgtaaaacccttgttaatgggcacaggcataacgaggagctcaaagactttgaaattcacaagaaaaaccaggtctagaccaccttgaggacgatttgctcctatgtaatatttggtgttagggcaagttctttaaagatcacctggtctgtaaggttttttaatattatacaatacctggtatattaggccattcttgcattgctgtacagaaataccagggactcggtaatttatacagaaaagaggtttaactggctttcagttctgcaggctttataggaagcatggtgttgacatctgctcagcttttggggaggcctccggaagcttataatcatagtggaaggtgagggtggagcaggcatgtcgcatggcaaaagcaggagccagagaaagagtggggagggggaggtgctacacacttttaaatgaccagatctcatgaaaactcactatcgcgaagacagcaccaagccatgtgtggttcgtcccatgactcaaatacctcccatgaggtcccacctccagcactgggaattacagttcaacatgagatgtgagtggggacaattgtccaaactatgtcacctgggttatgagagaaacgcacagtgttcagatgtaagagcaaaggtgggtaatgaagtgggtaatgaagtggactaggcagtggcgattctgccctgagacctcagattgtaacattctcttccccctttcttgtaaactctcctgtaagctgctggtcttcagtaggaaataggcgggttgggaagcaagaactttccatcggggcaaactgtgaccgaatagcaacagttcaacacgagttcctccacgctctgggattctggcatgagcagtcgcgttctgaccgggatgactatgtcaggataatgtgggacagaattctgtcaggtacatttctctttttttcctatgtttttagttaaggactgaatttctaagcatgtgtcctctcttgtcatctgtggcaactgttaataattttaaaactttgatgttttgatgtcttaattcattcagcttgaactcattctgagttattggagcactagtattccagaacccatatgagctagatatgctctagaaactggttttgtggttcttaaagcatattcagtcccacaatatgttcatgagtattatgtggaacggagtctgtggccaaattagttttgcaaatccccaagtcttagtccatcttgcactgctataacaaaacaccacagactgggtaatttataaagaactgaaatttattcctcattgttctggtggctggaaagtccaaaatcaaggggtgggcatttgatgagggccttcttgctgtgtcacataccatgacagagggcagaggtcaagggagagtcagagagaaaaaacaggaccaaatctgtccttttacaaggaatccactcctgcagtagcaaacctacttctgcagcaatgggattaatccatttatgagacggagcccatgccctaattacctctcattaggccccacctcccaacactgttgcactggggattaggtttccaatacatgcttttggggggacatattcaaggcataacacctaggttaaaagaaattagacttacttatcctgctatactgctctgagtgtttattgggttgacaggaattgtaaatctctaagaaaaggagcatttcccaaaatgatttgatcatggtcttcttttttctttttgcagagtagcttgtagagtatttggatttattgtttcatggaacaattttcagtaatagttgagtagcatgaactgtttgtgattttgtgttcaaagtcacaaagtcttaataactatgtctgactagagctcatgttttccacattccacagtgacactcagcttcctcatctgtcctgcctgtgtggggcgagacagaggaaagggcattgctattatgtctgaggcactgtgaggagtgccctatacaaggtcccctgacaccacacttcttgaaatcacagctcttgctctttatcccccgactctgcttatctcaaatgcggtcaggcatagcagcaaactaaaagatttctagagaaacagcagtgtttagctttaatccacagccacactccttaggattcccaaagtcttatttttgatctaaacttctgctcacatttgataacacatctttatgttttggagatcagaaccaccttaaagtgtccacagaatcattccatttcaagttgaaatcagttgcccattagtataatgctaaatggcctgaatgtcttctctaaatatattcatttttgttttttattattattttaaactgacaaatcataattgtatatacttatgtggtacagtgatattttgacatgtgtacacaacgtggaatgactaaaacaagctacttaacatagccatcacctcacttatcatttttatggtgagacatttgaggtttattctcttagcaattttgaaatatacattattattaactatagtcattatgctttatttatttatttattttgagacagaatctcgctctgttgcccaggctggagtgcagtggtgcgatcttggctcactgcaacctccacctcctgggttcaagtgattctcctgcctcagcctcccgagtaactgggattataggcgcccgccaccacacccggctaatttttgtatttttagtagagacagggtttaaacatgttggccaggctggttcattgtgctttaaatacatctacacctattccagtaaccatgaattatggttagtcaataactgcatgtcaatgctttttaatgactcctctgtaggataactagaaagttatcattcccaggtttcatctcaccatcccttcaaagccttcttacttccatctccatctactgtggacgtcctcagcctgccatcgttgctggccaatgccctgactggttcaacaacactttttttttttttttttgagacagagtcttactttgtcacccaggctggagtgcagtggcgtgatcacagctcactgcaggctcgacttcccaggctcaggcaatcctcccacctcagcctccggagtagctgggactacaggcatgcaccaccatgcctggctaatttttaaaatatttattttattttattttatttgagatggagtctcattctgtcacctaggctggagtgcagtagtgcaatcttggctcactgcaacctccgcctcctgggttcaaccaattctcctgcctctgcctcctgagtagctgggattataggtgcgcaccaccacaatggactgatttttgtatttttagtagagacagggtttcaccatgttggtcaggctggtctcgaactcctgacctcatgatccgcctgcctcgacctcccaaagtgctgggattacaggcgtgagccaccacgcccggccttaaaatatttattagagatgaggtctcactttgttgcccaggctggttagcagcactttctagaatcctcctttccacgagcaatttttacagccttagactaaatgccaatgtcctaactatgggctgcaatagaaccttagatatgttcagtgtgactgctggtatcacagttctaagcttgaatattatattgtaagatgggaataatgaaactgttgttagttgtagcaaaaattgcttgagtttattatattctccatttctaagtgagcagtatttggagtaagataagctgaattttgtgaacatcaagtaaagattttttatttatcctttaggcagagagcacaattttaacacctatagtgacgatatatcagattccctgaatgttccctatgattacacttcagtaatgcactacagtaaaactgcattccaaaatggaacagagccgacaattgtcacaagaatctcagactttgaggatgtgatcggccaacgaatggatttcagtgactctgatctcctaaagttgaatcaactgtataactgctgtatgtgacaggttctttgaaatgacttatattttccgctgttatgtaggaaaaaatgatggtctgtgccattttgtcaagcattggtggggtttctgcgattatagagatttgatattcaggaaataaacagaatagcactcagatctcaatctacaacttggaagcagcatttttcttttcaccacgtctggtgttgagatctaaaaacaaattgggtcctgtaggaatatgcctcaggcaagtttttaaagctgttactaattcaaacctcggtcagattgatactcacacttccttttagccaaaatgatatgtctagttgtaatatgaatgggatcaaataatctggattgtggcttaatgattcgaataactaggggagtatagactcaggtttctacaaattagaaaattttttttaaaaaagacttcaggcagggagcttattcagatctacagaattcattaccttctttgtaggggttctgcaaataaagagggatctttaagccaccatcatccagaatcagctaggtgttccctgtaataccaacctggcatttctaatactgtgataagttcagtttttgttacttagattatcatgttgtatgagtgtcaataattgttttttgctttttgtagcctcttccttgagttttatggactcgtgcagttttgaactggaaaatgtgtgtggcatgatccaaagttcaggagataatgctgactggcaacgggtttcacaggttcccagggggccagagagtgatcactccaacatgggccagtgccaaggtaacaggagtgagatattcctagactgtatactcagtggctacagccacatacttctctatgaaagaatgggattttatctctaatttctatcagaattattaatgattattcattaggttactactgagaagtaggccttgcacctgataaagacattgttaatttctttgcttttccttcctgagtttatttttctttctacaagtcagagctgggctctgtgatgcctctaccagtgcgttcccataggagagtgtaccagactgggcctcctgcaaggcctcttatctcaggggcagtactattgtttcctagaagtttgcagaatacaagagactctttccaatggacagcactaggctgcgaattattgtttcagaactgtagctggatgtgattatatgctcctgttacaaaaatatctaaaaagcagagtttatttaattttcttcagatgcgtatccttttccattttcattttgttttgccttaagtagttatttggctacaaggaccaaatttttacgtatttgcttattctggcatcaaatatgtaaaactagacttcagaacttagggccagtgcttaatagctcagatgatctaggcaggaattggaggcctctaatggcaaaaaggtgcttttccttttatttttctttttaaatgcatatttggatagtggatagtggtcctactcagaccagaggaaagtagatagggagggagggggaaaagaagaagaatccagaccaggtagctctcacttttttctgtttttgaaaactaatttctgtggtaagggaaaggttccctaatgttgtctctttcataaatcgcctgctcctagaaccatatttaaatgcccaacacaattccctgcatatagtggaaactaagcgaatacttgaaataaggtaaagaaaattgggccgggtgcagtggctcatgcctgtaatccccggcctttgggaggccaaggtgggcggattacctgaggttgggagtttgagaccagctgggccaacatggtgaaaccctgtctctactaaaaatgcaaaaattagctgggtgtggtggtgcatgtctgtagtcccagctagttgggtgactgaggcaggagaatcacttgaacccggggggcagaggttgtagtgagctgagatcataccattgcgtatcagcctggacaacagagtaagacgttgtctcaaaaaaaaaaaaaaaatgaaagaaaatatatatacactcaaaccagaattactagctgtgccttctttagagatggcttagaaggttaagtattgcagataatgaaagcagataagtgggaggtgcctctgaaattatcaggttcagttattctcaattttttcattacaagtatcattttaaaaatattaaaatgtgaatctccccagatggttgctgtagttaacaatatcttctgaaagttgaatttctttcttccttttctttttttcttccttctttttttgtgacagtttgaagccaaagaagttagaaagtgtttaaaaaaaaaaggggggcgggcaggtcagccaaggccctggtttcctggctggactctcacctctgtccgcagtgtgtgttcacctttccagaaagacctagaagttcacgttgaattacccttgggagacacagatgctacaactctctacccacccaagtttcaaaccctcgttttgacttaatttccattttcctttttcatattctcagcgggggaacaaccctctgtagcatctttgtccaatggtagctctttccacttggagctggaccagggttttggacacttgaaaggtgtcccatgtagaatctaccttttagccctgctgtttgggcttgacctgcagccttacagtggatttttaaaaagttagcatttgatacttaaacttgctttatctttatagctcataacaaatgaagataagcaaggattagtgcccacggaaaactactattgtaagtaaacgttttataaataatagagaggtttgagttttatactgttatgtcaatctgctagcttttgcaagtgccagatatgtagcttaggcttctgtcatttctccctggcgatttatatatggatgttacttatgcctcgcgtaaagaatctagcaccaccattaacaaacacacattcctatacccagtatctgtttttctctcaattctgcttttctttaacaggttctggtttcttcatgcatttcgatagcagctctgtaaatgtgggggccacagcagtgctggaaagtagaacgctgtaccctaaaagaggatttcagtgcctgcaattttacttatataacagtggcagtgaaagtgatcaactgaacatctatatcagggagtattctgcagacaatgtggatggcaatttaacccttgtggaagaaataaaaggtacaatgtcaacatccttattgtctggatttaaaatgaggcaatcttaggtcttttctttagttaatgcaacaatttacaatagggcaggggctactgagtcactatacttcaactaagaactagattcttgttttaagctgtggaaaggaagctagaatgaagattctttctgagtgctctgttatgtaacactcacttaagaaactgtagatcagtctctggcactatggaggtcagttcttggcaaataataaaaatacaaggctgggcgcagtggctcacacctgtaatcccagcactttgggaggccgaggcggtcggatcacctgaggtcacgagtttgagaccagactggtcaacatatagtgaaaccttgtctctactgaaaaaatacataaattagctgggagtggtggcacacgcctatagtcccagctacttgggaagctgaggcaggagaattgcttgaacccgggaggcgggggtggcagttgagccgagatcatgccactgcactccagcctgcgcgacagagcaagactccatctctgaaaaaataaataaaataaaataaaataaaaataaaatacataaaaatacaatgtgaactagcttaggcaaaataggatgggctcctggctaaatgttagttacagcctgtgggacagatgagggagacactggcttgagggggaattattaatagatctgtctctgaacattgctggggacctcttgttttatctcagaatggctgtctttataagactggtacttcggttgtttcacttcccagcttacatttgaccaaatttgctatcagtctggaaaaaggactcttcctctaatataaagcttaaaaaataaatcccagtgaagaactgggatacttatgtcttaagttaaacacagcttctggagcaattcctgagtgggaaatgggtacccacccttcataccaataatgtgtcagagaggagagccatgttgaccacctatgcaagtagatggttaagggggtgactgagaaagggaggggctgtgggctggcaaatatattactgtctattccacctaatcatctcatgacttgaatgaattgagtaattcaatttgttccacaattggatccatattatgcaatatagtatgccattttcctcctgttttcaacaatgagaaacaatctgaaatacaggcgatatttttctttgtgaacacctgtaagcagtaaggttcttaatctcactaagcatatacacacattatacatatatattatttatgtaacaatgtaaaatatataaagaataattatatataatatattatatattacatatataaaagccttatatataagccatatatgttactataaatattatattttatgtattaatatctaaattaatacaaatattgatataatgtatctgtaatatatataattgtccaggactggaaggggggtccttcctattagcaatctgtgggttcgtcattgatacacaataacacaaaaaggcacttaagaagcttgcttattttctgtcatttgggtatgtctagcttattttcaagtaactgtgtttcacattaagtgccaacatatttttgttttaagactttgtgttaaccactagtttgacatgaattcctcagctgttgttcatctgggggcctctgcagattatttagtatactgcttcttatttgagtatgtgatataagaaaatcagacagaatggcatattatgtgctgctagcgaggggtatgggctaatagttggggaggaagtacaggttggaaagaaaggaggtggtaccaaatatcagataaatacttacaatgctgagttactgggaagtgatctaaagagtagattgcaggatgtaggctttctagggtttggtggattttgtttaatattaccaaaaagttgattgaagactttgtatgtgagggaagtattccaatcaaactataaatatattaaagaaggctttgcctgagtatcacaggaatcttgagtagaagtgttacaagtgttgggtttgctggccctttaatggagaatggcaggtaactcataggtagggcatgaagtactcatgagctagatgttgttatttactcaccgatctctaggaaagggtgatctatttgagaaacagctagacaaacgttcagctattccagagaacagtgtgaccccacagaagcaccttgaagtaaataattctaggctggagctttggcaaaaccatacttctgacctgtagaaataaatcggttttggatgaccctttgtctaagaaggctagaaatctaatgttgacatgtacatgatttgaacttctttgtctttgaaataataatgactcttttgcagaaatacccactgggagctggcaactttatcatgtaacattgaaagtgaccaagaagtttagagtggtgtttgaaggacgcaaaggctctggtgcatcactgggtggtctgtctattgatgacatcaatctttcggaaacacggtgccctcatcatatctggcatataaggaatttcacacagttcattggcagcccaaatggaactctgtatagccctccattttactcttctaaaggttatgcctttcagatttacttaaatctagcccatgtgactaatgcagggatatatttccacttgatctctggagccaatgatgatcaattacagtggccatgtccttggcaacaagccacaatgacacttttggatcaaaatcctgacattcgacagcgtatgtccaatcagcggagtataactacagacccatttatgaccaccggttcgtaactcattttctttattgctaataaacaatcattgctctaggagggactgataattttgggaatgagggattgcacagttagttacctagggaattttgagccccaaatcttaagaacagatatttaggggaaaggtttcaagaattgtggactgagtctgtcagacaggagctcatcacaaatgtcagcaaggactccaacaaatgctgactgtattcctaagaactgatggcccttctcaaatttccacttctgtgcaagaagtgttggttttagagtctgacatgcctgagttcaagtccaaagtttgcttctcattagttatgtaatcttgagcaaataatctcttagggccccagtgtcctcagctgtaaagccagggctgtagtaatcattccacagatttgctatgagaattagtacaggtcaagtgtggaagctgtggaaaggcctgcggtggagaggccctcagatgttgggttcttctaactcatgctaccttgttcacgtcactgggattgtcaaaaataattcagcgtttgaaatgggggtagtttttgaccagaaggaaggtattgagcaggtgcattcaagtgttggtgggaagggtatgaaaatgcattataatttcttagtaaaaagttacagaggacttgctaatcatgacatcattccccatctttcccatctcaaaaagaagcaacccactgaaagcaaagatcacactactaattttaataattctttgcttctgagaccctagtaaaggaaaaaatggaattatggcaagctgaataattttgccaaatgtgaattctatatatgaaaaacatggaccaaatcgacatagaaaaaaatccaacttaatctcataggaaaacaataatattcaccaatggaattgtagggacttgacattcagaatttcttcactttttcctaaagtgtttcttactaaatgacattaaaaacagctcagggctgggtaggtcattatcttttcccagaagcagtgcttcttgttgtcttctacttctgaagcactttgctctgttaggtgaataattcagttaataagataaatcatcctatgctgatattaaaaactctctcagcaacatattgctttaactggacaatctgtaactttgtaaaaggactctcttagtagccttgaagcctattctaaattattctaatagataggagggtttctatactggccaataagtaaagatatgatattcccaggaatatctggtacctaggaaacttctggtacctctccactcttattctagagtgtggtcctccctgccaggcaatttcatttcctctaggacagtataaatgaacaagccccagtgatttgccagggaatacatcacaggtcaatagcatcatttaattattttgagttccagcctaattgtgtttcacattgcctgttctttcctaccaccaaaagctacgatgatgataaacacactccattaatataaattgctttttcagataatggaaactatttctgggacaggccttctaaagtgggaacagtggctttgttctctaatggaactcagtttagaagaggtgggggctatggaaccagtgcctttataacccacgaaaggctgaaaagcagagattttataaaaggagatgatgtttatatcctactgacagtggaaggtatgtcaataaaaatagttttatataaactagtttttttttgttgtggccactgattattttctgtttttctttctgcattccacttttagatgtattatatagagatgtggggggaatgggcatgaatggggtttgggaggaatatgaattattaacaatatgaaaataatttaatttgaaacagtgaggattccagaataaagaatttaatgaccaccacatgaagctatagcggaaacctttaggttgggaaatttctttagaaataagttaaaataggccgggcgcagtggctcatgcctgtaatcccagcgctttgggagaccgaggcgagtggatcacgaggtcaggagatcgagaccatcctggctaacacggtgaaaccctgtctctactaaaaacataaaaaattagctgggcgtggtggcgggcgcctgtagtcccagctactcgggaggctgaggcaggagaatggtgtgaacccgggaggcggagcttgcagtgagccaagttcgtgccactgcactccagcctgggccaaagagcgagactccgtctcaaaaaaagaaaagaaataagttaaaatagaactattataccctaggattcctgaaataaaaatatcacacaagcacatgaaattaaatgactggaaacgtctgcatcttacctgtttcaaatgtacatacatgcatacatatatgcatatatatatatatatatatatatatatatatatatatatatatatatatcttgacagaaatgacattaatctcttgttagactaatgttaaatttcttacacctggcagccaataaatacattttgcagcaattctggtggtttctattttttatgtggtaggattttaactcattttctattaaagacccacttggatctcagtaaatcagattcttgtttgtgatgaaaggtggtgcaattaaaacccacaaaattttgactccagtgtccattagagtaaatctagatgatacctcttggagagattattcagaaataacttctgttaagagagaaaatattttatgtagcagagaacaaaaatcagtatgcatcagttctctttgaccatagcgatttcaaccagaagcaataacaaatactgcaaagaatgtaacactggttgtcagggcacttggtgtcttgctccaaatctccaccaatttgctctaccaagccagagacctgtgaccttgggcaatgccctcaattactttacatttctgagttttggtttccttatctgtctcttgaaagttggtatcagtggcttgtacccttctgggctcccagaatccaggccagcatgtggttgagttggagccccagtaggctggcctagtttccctttgcctagttcttatctcgctgcctatgaatgttgctagactgtgcttcaaggatacctgaatttctcacaagcctaaaatctgatcattgtctattctgaaacttaagattgggcttggcatcatggctcacgcctataatcccaggactctgaggccggagtggaaaggctgtctgagcctgggagcaaagaccagcctgggcaacattgcaagatctcacctctaaaaaaaaaaaagaaagaaagaaaaaaggaaaaaagaaacattaaaagaaaatgaaaattaaagatcaaatgattgttaaacaaaagctgatttccatccacactcttccccatcttcctagacatatctcacctcaactctacacaaatccagctaacaccagcccctagtgttcaagacctctgctcaaaaaccacctgtaaaaatgacggtgtctgcactgttcgagatggcaaagctgagtgcaggtaaggatgatttgaaagagatctctccattctttggttagaaattttatttccataatgtaggattaattacttaatagttcttatgaatgaaatcagttgattctcatctcacagccattcatagaattttttttttattctccttttggggctttggataacctcaagaactatctttgtgatagccaacacaatttttttatgaaaaaaatagaactctatattctaattgtctgaaaaagtcctcataacagtccagtcattttaagtgtagctgcctccattttctagatgaagatactgacgttctgaggagcccttggccaagatgtgaatctggagggtggcgggcatgggacactgagaactaaactttctctgttatctgtgctatcggcctttcctaacttggagatactgttttagtatcagattaggaggaattccattttttctttccattgtttatacctgtgctctaggtgctagtctctctccagtccagagtgggtaaaatagtttcatatagcaatgacctattggtgatcaaatagactaaaggtgatccacatctttaactgtgaagatttctggagttagatatcaactaataactctgagtcatgctctcaacatgcaggtgccagtcaggggaagactggtggtacatgggagaaaggtgtgaaaagagaggctccacccgagacaccatagtcattgctgtttcatctactgttgctgtgtttgccttgatgctgatcatcacccttgtcagtgtctattgcaccaggaagaaatatcgtgaaaggatgagctcaaatcgaccaaatttgactccgcaaaatgtaagttgaggctgatgtttgattattcataacctattggtgaaatcttatggagaggaactaggacattttttatatactttggttcttgccttcttctctctgtttcctatgctgggacaactgatttcagattataaaagttcctattactttcactgtaaatcaacgattcttaaactgggatttatggaggttcattatcctcctggaattgtatacaacattgtgtacagttgtgtgtgtgggtttttttcctggagtgtggggtggtctgtgacctgaaaggcacaactgattttgcctgaaagttcaaaccttcctggtaaagggaagaggtggcctgcaagtgtttttgttctaaaggtcttgtagtggtggtgagctgaggccataggaaggggatgcaggcatgtttggggaagctttttcattaaagaaggttccagttcattctggcttcatgtggaataactaattctaaggcaagttttcaagtaaaggatttaaagtcttgcctcaaaaaatctctagaatgctaatagactcctgaaacgatcctgtttccagtgggtcccttgggaagctgactctgagatggatatttgtacgcaggaggtttattggggagggctcctggaacacgtataataggctgagggagctggcctgggcagagggtgaggttggaatgtgatgtggttgcagctgaggcctcagcccatccttcagggagctctggagtggggatgactccctcttaggcacgtcctgaatcgagggagggggccaggcctttgtactcccatcactggaagggggctgccctcaaagagggggcataaaattgggcaaggcaacggcctttgggggagggcatttcttgcataacagccttcattcaaagggcaggacaaagcagcagttccctagcatccactacatactccagcagtagagtacagagttttacatgcagattcatattcctctcaaagaagcacagagaaagtggcataaaatctgagcattacttaaaagtgaagccctaaaattcttccatttctatttcattccaattggagtctctgaaaattgctactgaagccagtcagaaaaaatgcccaattagaatatctccaaaaataaaaatactgcaattggctaaagcaagagtacattttcttaagaaaaacgattattcaagacatactatatttaaagctacgagtttttaaaggggacagcctggtatcaagtcagtcaaaacatgaacaatgataatgaactgaaagcaaatcgttgtattatcgtaggctgttgtcctatttcctcaacatcaggaagatgtttaatgctaataataaggcaatagatcaattacttcacaaaattattagaaaagtatttaaaatataaacaggttgttttgttttaagacaactttcagcttattttatgactcaaaataaaaggggaagatcagtgaatacttggcctggtaggtcaacctgatggcagctgtgcctgcaagttcggtctcctgggccattgggatgagccaggagttggtgcatggaaggtggaagagtagaagggcaggaggggacaagttaactgggtggatgggattgccaggatatttccctgacaatgaatgggtagtgtaacagctgttataagcaagtataaacttgcttagcaagtaaaaactggaaggagttaaagaaaaatgacaaaaccaaagagaagagaaagaaggaagctaggaagctaagtcaataaagcagggaaaccatgacagtattagagacatggtaaggatagtaagtggaaacacacatgcacacacacacacacacacactccataatattacaacagagctgttttgtttctgggtcatttaaacacattcctaaggacaaggcagttgacttacattatcttaggctaggcatttctacagctaattcactggtaacagatctcccagatgtcgtttagatcttaaatcagaatgacctttttttctgaggcgaatgtatgtgttcaccctaatgttttagcatctgaataatgtgggcccgaaaagccagggctcgaaatggagaccaggagcaggagccattgccagctaggagggaggccaggagactgctgatggggacttcatttaaagaccagatcattttattatgattcatttaaatagcagtttttaaatttagaaattaaatcatcaattgttctttccccttttagcagcatgctttttgaagattaactcgacaatatggccagctaatgaaattaaaaaggattcttcatcatggatttcgcctaagtgatattacagccacctcattcttctaaaagtggatatttttctgtaaatagctggaaatattataaatcactattttggtcaaagtc

SEQ ID NO: 97 - DNA, 124933 bp, Homo sapiens
actcctacttcagtgaacaaaaatcctctaataaagagatcacacccacaggatcacacacacacaaacacacacacacacacacaccccacatacacccatttatcttagagcagagtccaagacccaccaacacacatgatcctcagtcctttcatttttattatttatttatttatttatatttattatactttaagtgctagggtacatatgcacaacgtgcaggtttgttacatatgtatacatgtgccatgttggtttgttgcacccatcaacttgtcatctacattaggtatatctcttaatgctatccctcccccctccccccaccccactacaggccccagtgtgtgatgttcccccactctgtgtccaagtgttctccttgttcaattcccacctacgagtgagaacatgcactgtttggatttctgtccttggaatagtttgctcggaatgatggtttccagcttcatccatgtccttacaaaggacatgaacgcatccctttttatggccgcatagtattccatggtgtatatgtgccacattttcttaatccagtctatcattgatggacatttgggttggttccaagtctctgctatcgtgaatagtgccacaataaacatatgctttgcgtggtgcctccaagtgtcctcgcagatgccaaaaggaaggtggttcagttccctaatcagagacttcctggcaggacaaggtcctggcatcagcattagctgctgcaactctgaagggcagggtgtgagcctgctgtgggactgccccctcctagggctgggcctgctgactccagggtctgcttcccccacctctgcactccctctgctgcaggcctgagctctccttgcccctggctctcttctgcagagggcctgctctcagctgccacaagagggcgccggagaacggacctgagcagagaggcaggggctcctctgcaggtcctcccaggcaccaacccttctgggagggaggaaggcttgggagtcctcttagacagatcctcagtcacttccctctgcttgtgtctcaggaagaccacctcctcctactgtcttctgtgctagggatcacttccttgttgagtggaacctgagttttaagaggatcttctgctcctcttcatctggtccctttccttccaaggccccagagaggaaggcatgcagtgggccctagcggtgcttctagctttcctgtctcctggtgagtgcgctgcctacagagaggatcacgggttttgttttattttcttcttttgcaaggagtaccatactaaggaattcctcattatattttgtgttgttcccattgcagccagtcagaaatcttccaacttggaagggagaacgaagtcagtcatcaggcagactgggtcatctgctgaaatcacttgtgatcttgctgaaggaagtaacggctacatccactggtacctacaccaggaggggaaggccccacagcgtcttcagtactatgactcctacaactccaaggttgtgttggaatcaggagtcagtccagggaagtattatacttacgcaagcacaaggaacaacttgagattgatactgcgaaatctaattgaaaatgactttggggtctattactgtgccacctgggacgggcacagtgattcagatccgccctacaccacactgaaaatctgccttgtggctgcttctggtacacaagatagagccgccccctctcatttcctgccaccaaatttaccgtgtgctgaacaagagaaacattgcttaactcctgatctcccctgcaatattacactcccctggcagcagctgcaccctgttccccaccctcccccaggactttcctgaagaccaagccgccatctcagctaagcctcagagaagcagcctggctgagagcaaggttctcttagctctcctaggacatgggggaggcccactcactctgcttcctaggacaaatgggtacccctagggtccagctgtaaagcaagatattttggacaacaaatgggaagggaatttatactaaattgtgtatcccatcatgatccagaaaccgcagctgagactggtgcttattccttatgtctataacaatataagcaatactataatgaccactgaaacaccaggcctaggtatgcagttgaacattctctccctctgccctcccttttattctctctctcttttttcttaattctttgcttgcttttattatttttctctctcccttcctccctcgctccatcgctccctccgtccttccctccctctctccctctctccttccctcccttcctctcttctttccttccatccattctccttcgttttccttccttccttctttgcttttctcttgctttcctttttgggtacataatcagaatactttttccacaaaatcatttgaaataatttttctctatgtgttcatgtcaacattgatatagctactttaattgttcagttttcttttttacattttggaaatttgttgtattactttgttttgtttcatatctgttttgtatatataaaacatttacatggaagtgaagtcaaaattataaaagatgatgcatttgaagattttagcttccattgtagacttctcattcttcttttctccctgacactataggtaacaatatttttggcagttcacttgagttttttcactgtttgtcatagcggagtatgtattgtttctatttcaatgccatatttatattttctttctgatattcagtttctatatattttaatcaatcttatattttcctgtgtctggactgtgtgtcttacttctaaaggtgcacatacttcataagtatgcataaagacgtccatatcatttatttgaatgtttttatgcattcattatttaatgatggcatcattgatctatcaggaatttttatacaataattactgtattagtaataataatactggccaggcccggtggttcatgcctgtaatcccagcatttgggcagtccagtcgttaggatcacttaggccgggagattgcgaccagcttagccaacatggtgaaaccctgtctctactaaaaatacaaaaaattagctggctatagtggcgcacacatgtaatcccagctacttgaatgctgaagcaggagaatctgtagagcctggtaggtggagttttcagtgagctaatatcacactactgcagtccagtttgggcaacagagtgagactctgtctcaaaaaaatgaataacgataataataatattgatgctacatatgggtactgacattctggtagttaatgtactaagcacattacatgcatattttatttaatctacacagaaatttcattagggtttaaagtactgttgaatgtaacattagaaattgagggggttaattaacattccctgagtcatatactttaacttgataatgattgcaatccaagctctgtgattctgaaaacgagatttgtaaattcagtttgcattccctcatctttgggagtactaacattatttcacaactttataggtcatttatagttcttcttttgtgaattgccttgtcatactctttgcctattcctctcttggaggattaattttttcttattagtttgtaagagttaatatacactattttaaagatactgaccctttatccaatgtgttgaagatatttctcctcatttgttgttatttacatttggcatcttttggtgaattgaactttgaaaaaaaaagcattaaaatctatcagtttttctagggtgtctagtttgatgtcaagcttagaaaggccaatctcacctagaatttctatgcaattcatcattgtttaagtgtaatgattttgtttttattacaactaaatcactatctatatctggtaagaacgaaatgcaataatatttgtttccatatggtaagtcaatacccaaaacagaacttataaaataattgactatttccttgtgggtattaacatatcactttatcacatgataaaatattacatacgtgtggctctctttctggattttccactgtgttccatgaatcttctcattctagtgccagtattgccctctcttcagcactgtagctttatacttcttttcacattttgatgaagtttctctcattatttttttgttttaagaattttctgtgcattctagtgtgatctcaatcctctcccttcccatttttaaaccatgagacttctgtcctgcaagactttttcacgctccaaggcaggcaagcttccctccttcacaaggacccgagaactcagctttcagagctgctcctacagcagcctcatgtcctgcatgtgtgctccagaggcagagggagaccaaccagagccccctccctttctcattcccagctgtgatgacagcagaaactgaactctctgagctagcccaacacaacaactgagagggacactgttctccatctcattatgcatatttcaaacatgtgtctctatatacttcttacagaggtggtgataatctgtgaatgccttactgaattttcacaataatattactgtacttgatttgtccccttattttcatctgtgaagccaggtgcactgcagatattagtctgctttctgagggtagggatgacaaataaaatatacaataccgggggaattggaagttcagataaataacaagtttttagtttaagtatgttccaaatattgcatgacatggcacccagttctactttaaaaacaaacaagcaaacaaacaaattcacactcctactttaatgaacaaaaatcttctaataaggaggtcacacacacaggattacaggcacaacccccacacacaaacacacacacacatttaccttagagcagagtccaggacacaccaacacacatgatcctcagtccttttaatttaaagcacgttcaacccttctcagagtggccttgagtggttgcctccatgagtctgcagatgcgaaaaggaagttggttccgggccctaatcagaggcttcctgtcaggacaaggttctggcatcagcattacctgctgcaactctgaagggcagggtgggagcctgctatgggactgccccctccaaggtgtgagcctgttaattccagggtcagcttacccaacatctgcagtccctcagctggaggcctgagctcttaatgcccctgcctcccttctgccctgggcctgctctcagctgccacaagagggcgccgaagaaagggcctgaggagatgcaggagctcctctgcaggtcctcccaggcaccaccccttctgggaggaaggcttgggagtcccctaagacacatcttcagtcacttctctctgcctgtgtctcaggaaaccagctcctcctactgtcttctgtgctagggatcacttccttgttgagtggggcctgagttttaagaggatcttctgctcctcttcatctggtccgtttccttccaaggcccccgagaggaaggcatgcggtgggccctactggtgcttctagctttcctgtctcctggtgagtacgctgcctacagagaggctcacaggttgggttttgttttgttttcttcttgaaaggggtgccatacaaaggaatacctcattgtattttgtgttgttcccattgcagccagtcagaaatcttccaacttggaagggagaacgaagtcagtcaccaggcagactgggtcatctgctgaaatcacttgcgatcttactgtaacaaataccttctacatccactggtacctacaccaggaggggaaggccccacagcgtcttctgtactatgacgtctccaccgcaagggatgtgttggaatcaggactcagtccaggaaagtattatactcatacacccaggaggtggagctggatattgagactgcaaaatctaattgaaaatgattctggggtctattactgtgccacctgggacaggcacagtgattcagacctgtcctacaccacactgaaaatctgccttgtggctgcctctggtacacaagatagagccgccccctctcatttcctgccaccaaatttcctgtattctgaacaagagaaagacagcttaactcctgatctccctcctaatatcacactgtcctggcagcagctgcatcctgttccccacccctcccccacaactttcctgaagatcaagctgccatctccaggcctcagctaagcagcctggctgagagcaaggttctctcagctctcctaggacatgggggaggcccactcactctgcttcctatgacacacaggtacaactagggtccagctgtgaagcgagatattttggacagcaaatgggaagggtatttatactgaatcatgtatccactcatggtccagagatcacagctgagagtggtgcttattccttatgtctataacaacataagcaatactataatgaccactaaaacactaggcccaggtatgcagttgaacatggtctccctctgccctcccttttattctctctctcttttcttacttctttgcttgtttttatttttctctccctccctaactccctccctccatccatcctttcctcccttcctcccttgtttccttccatccattctccttccttgttttccttccttccttccttgcttttctctctctttctttcctttttgggtacataatcagaatactttttccacaaaatcatttgatataatttttctctatatgttcatgccaacattcatacagctagtttaattgttcagttctctttttcacattttggaattttgttgtattactttgttttgcttcatatctgttttgtatatataaaacatttacatgaaactgaagccaaaattataaaagatgatgcatttgaagattttagcttccattgtagatttctcgttcctcttttctccctgacactataggtaacaatatttttggcagttcacttgagctttttcactgtttgtcatagcggagtatgtattgtttctattttaatgccatatttatattttcgttctgatatttggtttttatacattttaatcaatcttatattttcccgtgtctggactgtgtgtcttacttctaaaggtgcacgtacttcataagtatgcataaagaagtccatatcatttatttgaatgtttttatgcgttgattatttaatgatggcatcatcgatctatcaggaatttttatacaataattactgtattagtaataataatacttgccaggcccggtggctcatgcctgtaatcccagcatttgggcagtccagtcgttaggaacacttaggccgggagattgcgaccagcttagccaacatggtgaaaccctgtctctactaaaaatacaaaaaattagccggctgtagtggcgcacacatgtaatcccagctactttggatgctgaggcaggagaaactcttcaacctggaagttggagttttcagtgagctaagatcacactactgcagtccagtttgggcaacacagcgagactctgtctcaaaaagactaataataataataatattgatggtaaatatgggtactgacattctggtagttaacgtactaagcacattgcatgcacattttatttaatctacacagaaacttcattaaggttttaaagtactgttgaatgtaacattagaaattggggggttaattaacattccctaagtcatatactttatcttgataatgattgcaatgcaagctctgtggttcctaaatgagatttgttaatttggtttgcattcccccatctttaggagtactagcatcattttacaactttacaggtcatttatagttcttcttttgagaattgccttgtcatactcttttcctattctttttttggaagattagttttttcttattagttcgtaagaattaatatacaccattttagagatactgaccctttatccaatgtgttgaagatatttctcctcatttgttattatttacatttggcaccttttggtgaattcaactttgaaaaaaaaacaataaaagctatcaatttttctagggtgtctagtttgatgtcaggcttagaaaggccaatctcacctagaatttctatgcaattcatcatcgtttaagtctaatgattttctatttattacaactaaatcactatttgtaactagtaaggtagaaatgcaacaatatttgtttccatgtggtaagtcaataccaaaaagagaacttatttaataactgactatttccttgtgggtattaacatatcactttatcacatgataaaatattacatacatgcagctctctttctggattttccactgtgttccatgaatcttgtcattctagtgccagtattgccctctcttcagcactgtagctttatagttcttttcacattctgatgaagtttctctcattatttttttgttttaagaattttctgtgcattctagtgtgatctcaatcctctcccttcccatttttaaaccgtgagacttctgtccagcaagactttttcacgctccaaggcaggcaagcttccctccttcacaaggacccgagaactcagctttcagagctgttcctgtggaagcctcatgtcctgcacgtgtgctccagaggcagagggagaccaaccggagccccctccctttctcattcccacctgtcattcccagctgtgaagacagcagaaaccgaactctgtgagctaggccaataccacaactgagaggaatattgttctacatctcattatgcatctttcaaacatgtgtctctatatacttcttacagaggtggtgataatctgtgtatgccttactgaattttcacaattatattactgtacttcctttgtcccctatatttccatctgtgaatccaggtgtactgcagatctcagtcccctttctgagggtagggctgacaaataaaatatacaataccaaacaatttggaagttcaggtaaacaacaagtttttagtttaagtatgttccaaatattgcatgacatggcaccctgaactacttagaaaaaaaaaaacaaaaaaaactcacactcctacttcaatgaacaaaaatcctctaataaagagatcacaaccacaggatcacacacacacaaacacacacacacacacacacccaacacacacacctttatcttagagcagagtccaagaccaaccaacacacatgatcctcagttcttttatttttattatttctttatttatttatatttattatactttaagtgctagggtacatttgcacaacgtgcaggtttgttacatatgtatacatgtgccatgttggtttgttgcacccatcaacttgtcatctacattaggtatatctcctaatgctatccctcccccctgcccccaccccactacaggccccagtgcgtgatgttcccccactctgtgtccaagtgttctcattgttcaattcccacctacgagcgagaacatgcactgtttggatttctgtccttggaatagtttgctcggaatgatggtttccagcttcatccatgtccttacaaaggacatgaacgcatccctttttatggccgcatagtattccatggtgtatatgtgtcacattttcttaatccagtctatcactgatggacatttgggttggttccaagtctctgctatcgtgaatagtgccgcaataaacacacgctttgcgtggtgcctccaagtgtccttgcagatgccaaaaggaaggtggttcagttccctaatcagagacttcctggcaggacaaggtcctggcatcagcattagctgctgcaactctgaagggcagggtgtgagcctgctgtgggactgccccctcctagggctgggcctgctgactccagggtcagcttccgctacatctgcattccctctgctgcaggcctgagctctcctggcccctggctctcttctgcagagggcctgctctcagctgccacaagagggcgccggagaacggacctgagcaagagaggcaggagctcctctgcaggtcctcccaggcaccaatccttctgggagggaggaaggcttgggagtcctcttagacagatcctcagtcacttctctctgcttgtgtctcaggaagaccagctcctcctactgtcttctgtgctagggatcacttccttgttgagtggggcctgagttttaagaggatcttctgctcctcttcatctggtccctttccttccaaggcctcagagaggaaggcatgcagtgggccctagcggtgcttctagctttcctgtctcctggtgagtgcgctgcctacagagaggatcatgggttttgttttctttattttcttcttttgcaaggattgccatactaaggaattcctcattatattttgtgttgttcccattgcagccagtcagaaatcttccaacttggaagggagaacgaagtcagtcatcaggcagactgggtcatctgctgaaatcacttgtgatcttgctgaaggaagtaccggctacatccactggtacctacaccaggaggggaaggccccacagcgtcttctgtactatgactcctacacctccagcgttgtgttggaatcaggaatcagcccagggaagtatgatacttacggaagcacaaggaagaacttgagaatgatactgcgaaatcttattgaaaatgactctggagtctattactgtgccacctgggatgggcacagtgattcagatccgccctacaccacactgaaaacctgccttgtggctgcttctggtacacaagatagagccgccccctctcatttcctgccaccaaatttaccgtgtgctgaacaagagaaacattgcttaactcctgatctcccctgcaatatcacactcccctggcagcagctgcaccctgttccccaccctcccccaggacttccctgaagaccaagccaccatctcagctaaacctcagagaagcagcctggctgagagcaaggttctcttagctctcctaggacatggcggaagcccactcactctgcttcctaggacaaatgggtacctctagggtccagctgtgaagcaagatattttggacaacaaatgagaagggtatttatactaaattgtgtatcccatcatgatccagaaatcgcagctgagactggtgcttattccttatatctataacaatgtaagcaatactataatgaccactgaaacaccaggcctaggtatgcagttgaacattctctccctctgccctcccttttattctctctctctttttttaattctttgcttgcttttattatttttctctctctcccttcctccttccctccgtccttccctccctccttccctccctctctccctccctccttccctcccttcctctcttctttccttccatccattctccttcgttttccttccttccttctttgcttttctcttgctttcctttttgggtacataatcagaatactttttccacaaaatcatttgaaataatttttctctatgtgttcatgtcaacattgatatagctactttaattgttcagttttcttttttacattttggaaatttgttgtattactttgttttgtttcatatctgttttgcatatataaaacatttacatggaagtgaagtcaaaatcataaaagatgatgcatttgaagattttagcttccattgtagacttctcattcttcttttctccctgacactataggtaacaatatttttggcagttcacttgagctgtttcactctgtttttcatagcggagtatgtattctttctatttgaatgccatatttatattttctttctgatattcagtttctatatattttaatcaatcttatattttcctgtgtctggactgtgtgtcttacttctaaaggtgcacatacttcataagcatgcataaagatgtccatatcatttatttgaatgtttttatgcattgattatttaatgatggcatcactgatctatcaggaatttttatacaataattactgtattagtaataataatactggccaggcccggtggctcatgcctgtaatcccagcatttgggcagtccagtcgttaggatcacttaggccgggagattgtgaccagctcagccaacgtggtgaaaccctgtctctagtaaaaatacaaaaaattagctggctgtagtggcacacacatgtaatcccagctacttggatgctgaagcaggagaatctgtagagcctggtaggtggagttttcagtgagctaatatcacactactgcagtccagtttgggcaacagagtgagactctgtctcaaaaaaatgaataacgataataataatattgatggtacatatgggtactgacattctggtagttaatgtactaagcacattacatgcatattttatttaatctacacagaaacttcattaaggtttaaagtactgttgaatgtaacattagaaattgggcggttaattaacattccctaagtcatatgctttaatttgataatgattgcaatccaagctctgtggttccgaaaatgagatttgtaaattcagtttgcattcccccatctttgggagtactagtattatttcacaactttataggttatttatagttcttcttttgtgaattgccatgtcatactctttgcctattcctctcttggaggattaattttttcttattatttcgtaagagttaagatacactattttaaagatactgaccctttatcgaatgtgttgaagatatttcccctcatttgttattatttacatttggcaccttttggtgaattgaactttgaaaaaaaaagcattaaaatctatcaatttttctagggtgtctagtttgatgtcaagcttagaaaggccaatctcacctagaatttctatgcaattcatcattgtttaagtgtaatgattttgtttttattacaactaaatcactatctatatctggtaagaacgaaatgcaataatatttgtttccatatggtaagtcaatacccaaaagagaacttataaaataattgactatttccttgtggatattaacatatcactttatcacatgataaaatattacatgcatgcggctttctttctggattttctactgtgttccatgaatcttctcattctagtgccagtattgccctctcttcagcactgtagctttatagttcttttcacattctgatgaaatttctctcattatttttttgttttaagaattttctgtgcattctagtgtgatctcaatcctctcccttcccatttttaaaccatgagacttctgtccagcaagactttttcatgctccaaggcatggaagctttcctccttcacaaggaccccgagaactcagctttcagagctgctcctacagcagcctcatgtcctgcacgtgtgctccagaggcagagggagaccaaccggagccccctccctttctcattcccagctgtgatgacagcagaaactgaattctctgagctaggacaacacaacaactgagagagacactgttctacatctcattatgcatctttcaaacatgtgtctctatatattcttacagaggtggtgataatctgcctatgccttactgaattttcacaataatattactatactttttttgtcccctatatttccaactgtgaatccaggtgcactgcagatattagtctgctttctgagggtagggatgacaaataaaatatacaataccgggggaattggaagtacagaaaaataacaagtttttagtttaagtatgttccaaatattgcatgacatggcacccagtactactttaaaaacaaacaagcaaacaaacaaattcacactcctactttaatgaacaaaaatcctctaataaggaggtcacacacacaggattacaggcacaacccctgcccccccaacacacacacacacatatttaccttagagcagactccgggacacaccaacacacatgatcctcagtccttttaataaagcacgttcaacccttctcagagtgaccttgagtggttgcctccatgagtctgcagatgcgaaaaggaacttggttcagggccctaatcagaggcttcctgtcaggacaaggttctggcatcagcattacctgctgcaactctgaagggcagggtgggagcctgctatgggactgccccctccaaggtgtgagcctgttaattccagggtcagcttacccaacatctgcagtccctcagctggaggcctgagctcttaatgcccctgcctcccttctgccctgggcctgctctcaactgccacaagatggcgcagaagaaagggcctgaggagatgcgggagctcctctgcaggtcctcccaggcaccaccccttctgggaggaaggcttgggagtcccctaagacacatcttcagtcacttctctctgcctgtgactcaggaagaccagctcctcctactgtcttctgtgctagggatcacttccttgttgagtggggccggagttttaagaggatcttctgctcctcctcatctggtccctttccttccaaggcccccgagaggaaggcatgcggtgggccctactggtgcttctagctttcctgtctcctggtgagtacgctgcctacagagaggctcacaggttgggttttgttttgtttacttcttttgaaaggggtgccatacaaaggaatacctcattaaattttgtgttgttcccattgcagccagtcagaaatcttccaacttggaagggggaacgaagtcagtcacgaggccgactaggtcatctgctgaaatcacttgtgaccttactgtaataaatgccttctacatccactggtacctacaccaggaggggaaggccccacagcgtcttctgtactatgacgtctccaactcaaaggatgtgttggaatcaggactcagtccaggaaagtattatactcatacacccaggaggtggagctggatattgatactacgaaatctaattgaaaatgattctggggtctattactgtgccacctgggacaggcacagtgattcagacctgtcctacaccacactgaaaatctgccttgtggctgcctctggttcacaggatagagccgccccctctcatttcctgtcaccaaatttactgtattctgaacaagagaaagacagcttaactcctgatctccctcctaatatcacactgtcctggcagcagccgcaccctgttccccacccctcccccacaactttcctgaagatcaagctgccatctccaggcctcagctaagcagcctggctgagagcaaggttctctcagctctcctaggacatgggggaggcccactcactctgcttcctatgacacacaggtacaactagggtccagctgtgaagcgagatattttggacagcaaatgggaagggtatttatactgaatcatgtatccagtcatggtccagagatcacagctgagagtggtgcttattccttatgtctataacaacataagcaatactataatgaccactaaaacactaggcccaggtatgcagttgaacatggtctccctctgccctcccttttattctctctctcttttttcttacttctttgcttgtttttatttttctctccctccctaactccctccctccatccatcctttcctcccttcctcccttgtttccttccatccattctccttccttgttttccttccttccttccttgcttttctctctctttctttcctttttgggtacataatcagaatactttttccacaaaatcatttgatataatttttctctatttgttcatgccaacatttatacagctagtttaattgttcagttttcatttttacattttggaaatgtgttgtattactttgttttgcttcatatctgttttgtatatataaaacgtttacatgaaactgaagccaaaattataaaagatgatgcatttgaagattttagcttccattgtagatttttcgttcctcttttctccctgacactataggtaacaatatttttggcagttcacatgagctttttcactgtttgtcatagtgccgtatgtattgtttctatttcaatgccatatttatattttcattctgatattcggtttttatacattttaatcaatcttatattttcccgtgtctggattgtgtgtcttacttctaaaggtgcacatacttcataagtatgcataaagacgtccatatcatttatttgaatgtctttatgcattgattatttaatgatggcatcattgatctatcaggaatttttatacaataattactgtattagtaataataatactggccaggcccggtggctcatgcctgtaatcccagcatttgggtggtccagtcattacgatcacttaggccaggagattgcgaccagcttagccaacatggtgaaaccctgtctctactaaaaatacaaaaaattagccggctgtagtggcgcacacatgtaatcccagctactttggatgctgaggcaggagaatctctagagcctggaaggtgaaggtttcagtgagctaagatcacactactacagtccagtttgggcaatagagtgagactctctctcaaaaaaatgaataatgataataataatattgatggtacatatgggtgctgacattctggtagttaatgtactaagcacattacatgcatattttatttaatctacacagaaacttcattaagggtttaaagtactgttgaatgaaacataagaaaatggggggttaattaacattccctaagccatatattttaatttgattatgatagcaatccaagctctgtggttccaaaaatgagatttgttaattcgatttgcattcccccatctttaggagtactagcaatatttgacaacgttataggtcatttataattcttcttttgagaattgccttgtcgtactctttgcctattctccctttggaggattaattttttcttattggttcgtaagaattaatatgtactattttagagatgatgaccctttatccaatgtgttgaagatattactcctcatttgttattatttacatttggcaccttttagtgaattcaactttgaaaaaaaaacaataaaacccatcaatttttctagggagtctagtttgatgtcagcttagaaaggccaatctcacccagaatctgtatgcaattcatcatcgtttaagtctattgattttcattttattacaactaaatcactatttgtaactggtaaggtagaaatgcgacaatatttgtttccatatggtaagtcaatacctaaaagagaacttattaaataattgactatttccttgtgaatattaatatatcactttatcacatgataaaatattacatacatgcagctctcttactgcattttccactgtgttccatgaatcttctcattctagtgccagtattgccctctcttcagcactgtagctttatagttcttttcacattctgatgaaatttctctcattatttttttgttttaagaattttctgtgcattctagtgtgatctcaatcctctcccttcccatttttaaaccatgagacttctgtccagcaagactttttcacgctccaaggcaggcaagcttccctccttcacaaggacccgagaactcagctttcagagctgctcctacagcagcctcttgtcctgcatgtgtgctccagaggcagagggagaccaaccagagccccctccctttctcattcccagctgtgatgacagcagaaactgaattctctgagctagcccaacacaacaactgagagggacactgttctccatctcattatgcatatttcaaacatgtgtctctatatacttcttacagaggtggtgataatctgtgaatgccttactgaattttcacaataatattactgtacttgatttgtccccttattttcatctgtgaatccaggtgcactgcagatattagtctgctttctgagggtagggatgacaaataaaatatacaatacgcagagaattggaagttcagataaataacaagtttttagtttaagtatgttccaaatgttgcatgacatggcacccagtactactttaaaaacaaacaagcaaacaaacaaactcacattcctacttaatgaacaaaaatcctctaataaggaggtcacacacacaggattacaggcacaactcaccccccccaacacacacacacatttaccttagagcagagtccaagacacaccaacacacatgatcctcagtccttttaatttaaagcacgttcaacccttctcagagtggccttgagtggttgcctccatgtgtctgcagatgcgaaaaggaacttggttcagggccctaatcagaggcttcctgtcaggacaaggtcctggcatcagcattagctgctgcaactctgaagggcagggtaggagcctgttgtgggactgccccctccaaggtctgagcctgttaattccagggtcagcttcccctaaatctgcagtccctctgctggaggcctgaactctcaatgcccctgcctcccttctgccctgggcctgctctcagctgccacaagagggcgccgaagaaagggcctgaggagacacaggagctcctctgcaggtcctcccaggaaccaccccttctgggaggaaggcttgggagtcccctaagacacatcctcagtcacttctctctgcctgtgtctcaggaataccagctcctcctactgtcttctgtgctagggatcacttccttgttgagtgggacctgagttttgagaggatcttctactccttttcatctggtccctttccttccaaggccccagaaaggaaggcatgcggtgagccctagcggtgcttctagctttcctgtatcctggtgagtgtgctgcctacagagaggctcacaggttgggttttgttttgttttcttcttttgaaaggggtgccatacaaaggaatacctcattatattttatgtttttcccattgcagccagtcagaaatcttccaacttggaagggagaatgaagtcagtcaccaggccgactgggtcatctgctgaaatcacttgtgaccttactgtaataaatgccgtctacatccactggtacctacagcaggaggggaagaccccacagcatcttctgcactatgatgtctccaactcaagggatgtgttggaatcaggtctcagtcttggaaagtattatactcatacaccgaggaggtggagctggaatttgagactgcaaaatctaattgaaaatgattctggggtctattactgtgccacctggggcaggcacagtgattcagatctgccctacaccacactgaacatctgccttgtggctgcctctggtacacaagatagagccgccccctctcatttcctgccaccaaatttactgtattctgaacaagagaaagacagcttaactcctgatctccctcctaatatcacactgtcctggcagcagctgcaccctgttccctacccctcccccacaactttcctgaagatcaagctgccatctccgggcctcagttaagcagcctggctgagagtaaggttctctcagctctcctaggacatgggggaggcccactcactctgcttcctatgacagacaggtacaactagggtccagctgcgaatctagatattttggacagcaaataggaaggttatttatactgaatcatttatccagtcatggtccagagatcacagctgagagtggtgcttattccttatgtctataacaatataagcaatagtataatgaccactaaaacactaggcctaggtatgcagttgaacattctctccctctgccctcccttttattctctctctcttttttcttacttctttgcttgtttttatttttctctccctccctaactccctccctccatccatcctttcctcccttcctcccttgtttccttccatccattctccttccttgttttcctccttccttccttgtttttctctctctttctttcctttttgggtacataatgagaatactttttccacaaaatcatttgaaataatttttctctatttgttcatgccaacatttatacagctagtttaactgttcagttttcatttttacattttggaaatttgttgtattactttgttttgtttcaaatctgttttgtatatataaaatatttacatggaactgaagtcaaaatcataaaaggtgatgcatttgaagattttagcttccattgtagatttcttgttcctcttttctccctgacactacaggtaacaatatttttgtcagttcacttgagctgtttcactctgtttgtcatagcagagtatgtattgtttctatttcaatgccatatttatattttcattctgatatttggtttttatacattttaataaatcttatattttcctgtgtctggattgtgtgtcttacttctaaaggtgcacatacttcataagtatgcataaagacgtccatatcatttatttgaatgtttttatgtgttgattatttaatgatggcatcattgatccatcaggaatttttatacaataattactgtattaataacaataatactggccacgcccggtggctcatgcatgtaatcccagcatttggccagtccagtcattaggatcacttaggccgggagatttggacccgctcagccaacatggtgaaaccctgtctctactaaatatacaaaaaattagccggctgttgtggcgcacacatgtaatcccagctactttggatgctgaggcaggagaatttctagagccaggaaggtgaaggtttcagtgagctaatatcacactactacagtccagtttgggcaatagagtgagactctgtctcaaaaaaatgaataatgataataataatattgatggtacatatgggtgctgacattctggtagttaatgtactaagcacattgcatgcacattttatttaatctacacagaaacttcattaagggtttaaagtaccgttgaatgtaacataagaaattggggggttaattaacattccctaagtcatatactttaatttaataatgatggcaatccaagctctgtggttctgaaaatgagatttgttaatttgatttgcattcccccatctttaggagtactagcaatatttgacaacgttataggtcatttatagttcttcttttgagaatcgccttgtgatactctttgcctattctccttttggaggattaattttttcttattggttcgtaagaattaatatatactattttagagatactgaccctttatccaatgtgttgaagatattactcctcatgtgttattatttacatttggcacctatggtgaattgaactttgaaaaataaaataatatctgtccatttttctagggtgtctagtttgatgccaggcttagaaaggccaatctcacctagaacttctatgcaattcatcatcgtttaagtctaatgattttcattttattacaactaaatcactatttgtaactagtaaggtagaaatgcaacaatatttgtttccatacagtaagtcaataccaaaaagagaacttattaaataattgactatttccttgtgaatattaatatatcactttatcacatgataaaatattacatacatgcagctctcttactgcattttccactgtgttccatgaatcttctcattctagtgccagtattgccctctcttcagcactgtagctttatagttcttttcacattctgatgaagtttctctcatttttttgttttaagaattttctgtgcattctagtgtgatctcaatcctctcccttcccagttttaaaccgtgagacttctgtccagcaagactttttcacgctccaaggcaggcaagcttccctccttcacagggacccgagaactcagctttcagagctgttcctgcggaagcctcatgtcctccacgtgtgctccagaggcagagggagaccaactggagccccttccctttctcattcccagctgtgatgacagcagaaactgcaaaatttgagctaggacaacacaacaaccaagagagacattgttctacatctcattatgcatatttcaaacatgtgtctctatatacttcttacagaggtggtggtaatctgtgcatgccctactgaattttcacaattatattactgtacttgttttgtccccttatttccatctgtgaatccaggtgcactgcagatattagtctgctttctgagggtagggatgacaaataaaatatacaatacccagggaatttggaagttcagatatataacaagtttttagttcaagtatgttccaaatatttcatgacatggcacccagtactactttaaaaacaaacaagcaaacaaacaaacttacactcctactttaatgaacaaaaattgtctaataaagagatcacacccacaggattacaggcacccccccccccgccccccgccacacacacacacatttaccttagagcagagtccaaggcccaccaacacacatgatcctcagtccttttaataaagaacattcaaccctcctcagagtggccttgggcagttgcctccaagtgtccttgcagatgtgaaaaggaagttggttcacagccctaatcagaggcttcctggcaggacaaggtcctggcatcagcattagctgctgcaactctgaagggcagggtgtgagcctgctgtgggactgccccctcctagggctgggcctgctgactccaggggtcagctttccccatatctgcactccctctgctggaggcctgaactctccatgcccctggctctcttctgcagagggcctgctctcagctgccacagagggtgctgcagaactggcctgagcagagaggcaggagctcctctgcaggtcctcccaggcaccacccttctggaaggaaggcgtgggagtcccctaagacacatcctcagtcacttctccctgcttgtgactcaggaagaccagccttccccactgccttctgtgctagggatcacttccttgttgagtgggacctgagttttgagaggatcttctgctcctgttcatctgggccctttctttcaagaccccagagacgaaggcatgtggtgggccctagccctgcttctagctttcctgtctcttggtaagtgtgctgcctacagagaggctcacaggttgggttttgttttggatttttcttctttagcaagggacgccatactaaggaatacctcattatattttatgttgttcccattgcagccagtcagatatctactaacttggaagcgaaaataaagtcaggcaccaggcagatggggtcatctgctgtaatcacctgtgatcttcctgtagaaaatgccttctacatccactggtacctacgccaggaggggaaggccccacagcatcttctgtactatgacatctgcaactccagggatatgttggaatcaggagtcagtcaggaaagcatgatacttatggaagtagaaggataagctggaaatttatacctccaaaactaaatgaaaatgcctctggggtctattactgtgccacctaggacaggcagagtgattcagacctgctctacaccacactgaatatctgtcttgtggctgcttctggtacacaagagagagccgtcccctctcatttcctgccctgaatttactgtattctgtacaaagagaaacagcttaactcctgatctcccccctaatattacactctcctgtcagcagctgtaccctgttccccaccctcccccaggactttcctgaagactaagctgccatctcagctaagcctcagctaagcagcctggctgagagcaaggttttctcagctctcctaggacatgggggaggcccactcactctgtttcttagggtccagctgtgaagcgagatattttggacagcaaatgggaagggtatttatactgaatcatgtatccaatcatggtccagagatcgcagctgagagtgctgcttactccttatgtctataacaatataggcaatattataaataccactaaaacactaggcctagatatgcagttaaacactctctccctctgccctcccttttattctctctcctttcttacttccttgcttgcttttattattttttcttccctccctccctccctccctctctccctcccttccttccttccttttttcatttcttccttccttgcttttctctctctttctttcctttttgggtacataatccgaatattttttcaacaaaatcatttgaaataatttttctttacatgttcatgccaacattgatatagctagtttatttgttcagttttcattttaaaattttagacatttgttgtattattttgttttgtttcatatttgttttgcatatgtaaactatttacatggaactaaagtcataattttaacgaagatgcatttggagattttaacttacattctagatttctttttctctctcttttttttttttttttttttttgagacggattctcagtctgtcactcaggctggagtgcagtggagcaatctcggctcactgcaacctccgcctcctgggttcaagagattctcctacctcagcctcccaagtagctgggatttcaggtgcccgccagcacatccagctaatttttgtatttttggtagagacagggtttcctcatgttggcctggctggtctcgaactcctgacctcagatgatccccctgcctcggcctccctaagtgctgggattacaggcatgagcaacctcaccaggccccattctggatttctctttcctcttctctccctgaccctataggtaacaatatttttatcagttcagttgaactttttcactttttcttattcagaacaagtctttcagtattacagaaaagtcttttgtttgtcatagtgcagtatatattgtttctatttgaccgtcatatttatattttcattctgataaggttttatacattttaatcaatcttttatcttccagtgtctagattttgtgtcttgcctctaaaagtgcatacacttcataagtatgaataaagaagtccatatcatttatttgaatgcttttattcatagactatttaatgatggcatctctgatctattgggaattttaatacaataattaccgtagtaataataatatgctaatgataaacacgggtactgacattctggtagttactgtactaatcacattgcatgtaagttttatttaatcttcacagaaaccccattgaggggttaaagtaccattgaatacaccagatgagaaataaagggcttaactaacattccctaagtcatatactttattcgatagcaatttcaatccaagcgctggggttcagaaaatgagatttgttaattcaatttgcattttcttacctgtgtgaatgctagcattacttaacaactttgtaggccatttatacttcttcttttgtcaactgccatttcatactcttcgcctattcttctgttggttatcatttttttcttattggtttgtaagaattaatacacctcattttagagatattgatcctttatcaaatgtattgaaaatatttctcgtggtttgctattattttcagcaccttttggtgaactgaactttgtgtactacttttaataaaacctatcaatttttctaaggggtctattttgatgttaggatcagagaggcaaatctcacttacaatatgtgtgcaattcatcatggttaaagtctaatgattttctgttttcagttttattacaagaaaatctccatttgtagctggcaacatagtaacttaagaagatttgtttctggccgggtgcagtggctcacgcctgtaatcccagcactttgggaggctgaggtgggtgaatcacgagatcaggagatccagactatccggggtaacacggtgaaaccccatctctactaaaaatataaaaaattagctgggcatgttggcaggtgcctgtagtcccagctactgagaaggctgaggcaggagaatggcgtgaacccaggaggcggagcttgcagtgagccgagattgtgccaccgcactccagcctgggggacagagagagactctgtctcaaaaaaaaaaaaaaaaaaaaattgtttccatatggtaagtcaattcccaaaagagaacttattacataatccagtagtttctcaaggatattaacgtacaactttatcatgtgataaaatattacatacacatggctctctttctggactttccagtgtgttccatgaatcttttcattctagtgccagtattgccgtctcttcagcactgtagctgtatagttcttttgacattacagtggagttactttcctttattgcttttttgttttaagggtgttctatgcattgcaatgtaatggcaaatctctcccttctaatttttaaaccgtgagacatcggtcccagcaaggattttccaggcttcaaggcacctgagcttccctccttcacagtgaccccaagaactcagctttcagagctgctcctgcggcagcctcatgtcctccacgtgtgctccagaggcagagggagaccaaccagagcccctccctttctcattcccagctgtgatgacagcagaaactgaattctctgagctaagccaataccacaaccaagagggatgttgttctacatcttattaggaatattttaaacatgaatctaaacatatttgttatagaggaggtgaatatctgtgtatacactactgaatgttcccaattattttattctacttgttttatcacccatatcttcatctatgaatccaggtgcactgcacatattagcctgctttccaaggatagagttgccaaataaaatatgcaatacccaggtaaattggaagttcagataaataacaaataagttttgagttcaagtatgtaccacatattgcatatggcactgcaccctgtacttttttttttctttttttgagacggagtctcactctgttgtccaggctggagtgcaatggcacaatctccgctcactgcaagctccacctcccgggttcacaacattctcctgcctcagcctcctgagtagctgggactacaggtgcccacccccacaaccggctaatttttttgtatttttagtagagacagggtttcatcgtgttagccaggatggtctcaatctcctgacctcgtgatctgcccacctcggcctcccaaagtgctgggaatacaggcgtgagccaatctcacactcctacttgatgtggcctttttacttgagaatgaacagaaatcctctaacaaagaggttacaaacacaaggtcacacacaccccctcctgacccccacacacccatttaccattgaggagagtccatggccgaccaacatacctgattctcactcctgttgagaggaggggccagctgggcttcctgggtcgagtaggggctcagcaagctgtgaaacgcactcatttcctgcatcacgacttacttcggtcctggatgaataatattgaagatatatgcttaaaatattccgaacaccaggatttgtgcatgtgttttcttccccatgaaagctatgaacagcgaaaattttcctgtaagtttccctgtgttctctctccctctcttccttccccctgccccaaaactaaagtaaaataacgttaactgcccgtttttctgtaaccagcagaccttatctatactcccaattccaattccttgtaaacatactttgtaaagtcctgtaagatcctgtctcctttgccatgacgctgcaaggtcataaagtagataaaacctaagttgcaattccggttttcctcaagatctaagacatgttacaaatggttaattgcctttgtttctcgctttggtaacatcttcccgcctcaggtatttcccgccttgaagagtttaaaaggcaatcctataatctaactctggctacccattctggaccccctccatgctttggaagctttgtactttcactctgctcaataaagcctacagctttttctctctctcggtccgtgtttctatcactcgctgcggtcagccgccacaccaattctatggcgtggctaggcaagaaccttaggtgttacactgttaataaagcaggttcaggccttctcagagtggccctgggtattttgcctccaagtgtccttgcgaatgtgaaaaggaaagcagttgaaagaccaaatcaagcttcctgacaggacaaggccctggaagcagcatcaactgctgaaactctgaagggcagggtgtgagcctgctgtggactgccccgtcctatggccctggccagctggcgccagggtcagctttccccacatctgcactccctctgctggaggcctgagctctccatgcccctggctctcttctgcagagggcctgctctctgctgccacaagatggcgctggagaaggggcctgagcagagaggcaggagctcctctgcaggtcctcccagacaccacccctctgggaggaaggctggggagtcccctaagacagatcctccatcacttctccctgcctgtgactcaggaagaccagctcctcctactgccttctgtgctagggaacacttcctgtttgagtgggacctgagttttgaaagcgtcttctgctcctcttcatctggtccctttccttccaagaccccagagaggaaggcatgcggtgggccccagccctgcttctagctttcctgcctcttggtaagtgtgctgcctacagagaggctgatgggttttattttgttctgttttgttttctcattttgcaaggggtgccgttctaaggagttcctcattatattttgtgctgttcccattgcagccagtcagaaatcttccaacttgcaagggagaaggaagtcagtcaccaggccagctgggtcatctgctgtaatcacttgtgatcttactgtaataaataccttctacatccactggtacctgcaccaggcggggaaggccccacagcatcttccatactatgacccctactactccagggttgtgttggaatcaagaatcagtagaggaaagtattttacttatgcaagcatgaggaggagctggaaattgatactgcaaaatctaattgaaaatgattctggatctattactgtgccacctgggacaggcacagtgattcacacctgccctacaccacactgaaaatctgccttgtgactgcttctggtacacaagatagaccagccccctctcatttgttgccaccgaatttactgtattctgtacaaagagaaacacagcataattcctgatctctcccctaatatcacactctcctggcagcagctgcaccttgttccccaccctcccccaggactttcctgaagacaagctgtcatcttcaggcctcagccaagcagcctggctgagagcaagactctctcagctctccgaggacatgggggaggcccactcactctgcttcctcggaccaacaggtacacctagggtccaactgcgaagcgagatattttggacagcaaatgggaaggatatttatactgaatcatatatctagagatcacagctgagagtgttgcttattctttatgtctataacaatataagcaatagtataattaccactataacactaagcctaggtatgcagttgaacattgtctccctctgctttcctttttgtctctctctctactttcttggttacttgctatttttctacacatccctttttctggcctcccctccctccctccctagctccctccctagcttgccttccttccttccttccttccttcctttcttcctccctctctccttcccttccttacttccttcctttctttcttcctccctctctccttcccttccttacttccttcctttcttcctccctccttctcttacttccttctttttttcctttcttccttttctctctctttctttcttttttgggcacacaatcagaatacagaatcattctctatatgttcatgccaactttgatacagctagtttattcgttcagttttcatttttatattttggaaatctgttgtattattttgatttgtatatgtaaaacctttacatggaactgaagtcaaaattataaaacaagatcaatttagagattttagcttccattctagaattctcttttctcttctgtgtctcaccctataggtaacaatatctttattagttcagttgaactttttcactttttcttatttattcagaagtctatcactattacagaaatacctcttttgcttgtcatatatgtgcagtatgcattatttctatttgaatggcatatttatgtttttgttctgatattctgtttttatacatttcaatcaatcttttagtttctggtgtctggattttgtgtcctacttggaaaggtgaacatacttcagaagtatgcctaaagaaattcatatcatttcattaatattttattcatttattacttgatatgatctatctggaatttttatacaataattactatagcaataataataatactgatgataaatatgggtactgactttccggtagttactgtactaagcacattacatgtatattttatttaatcttcacagaaaccttatcaacgggtttaagtaacattgaatatagcagatgagaaagtgaggggttaactaacattccctaagtcatatagtttaatttgatagcaattgcaatccaagctctggggttcagaaaatgagatttgttcattcaatttgcattttcttatctttatgaatactagcattattttacaattttataggccatttatacttcttcttttgtgaattgccttttcatactgtttgcctatccttctgttggggtattaattttttcttatttgtttgtaagaattaatatacaccattttcgagatattgatcctttatcaaacgtgttgaaaatatttctcatcatttgctattatttattttcagcaccttttggtgaactgaactttgtatattacttttaataaaatctatcaatttttctagggtctgtattatgatgtcaggctcagcgagaccaatgtcacctacaattagtgtgcaattcatcatcgtttaagtctgatttccttttttcagttttattacaactaaatctctatttgtaccttttaagttagcaacccaaggatatttgtttccatatggtaagtcaattcccaaaggagaacatagtaaataatcaagtatttccttgtggatattaacatacaactttatgacatgataaaatattacatacacgtggctctctttctggactttccactgtgttccatgaatcttttcagtctagtgccagtattgtcctctctttgttgtatctgaatgagttagagaaaatgccacactttgagacaaattaagattccgtttatttagccggcggccaagagacggctaatgctcaaaattctctcggccccgaagaaagggctagattttcttttatactttggtttggaaaggggaggggtgtctagttaaaacaattttacagaaataaagtaggcaaaaagttaaaaggataaatggttacaggaaagtaaacagttccaggtgcaggggctttaagactattacaaggtcatagacttggggctttgggcgttatcaatcagatggattcctgggaattgcggatatagcttgccacagtatcttatcagttaattgcattcttggatgtgctgggagtcagcttgcacaagttaagtccttgaggaaggggctgccagtgaaagagccaagatggagtctgtctggctctcttagctaagggagagtcaattcaggtggaaacaaggccaggtgattaaaggaaaagggagagtctaaaaacagggttagtaaaaacacggttgggcattacatcttcagcactgtagttttgtagttcattttatattccagtggagattgtttctctcattacttttttgttttaaggattttctgtgcattctaatgtgatggcagttctctcccttctcatttttaaaccatgagagttctgtcccaggcaggattttcctggctccaaggcaggtgagcttccctccttcacaaggaccccaatgactcagctttcagagctcctcccctggcagcctcaagtcctgtacgtgtggtggagaggcagagggagaccaactggagccccctgcctttctcattcccagctgtgatgtcagcaaaaactgaactctctgagctaggccaaaacaacaaccaagagggacattgttctacgttttatgaatatcttaaacatgtgtccaaacttttttttttttttaccgaagtgaaaatctgtgtatgcactactgaattttcacaattattttactatacttgttttatcacctgtatctccatctatgagtccaggtccactgcagacatcagtcagctttctgaggatacggttgctaagtaaaatatgcaatactcaggaaatttggacgttcagataaataacaagtttttagctgaagtatgtcccaaatattgcatgacatggcaccctgtattactttaaaaaaaaaactcacacttctacttgaatgaacggaaatcctctaataaagagatcacacacacaggcatacactcccaacacacacacacacacaaactcacagaggatcacacaaacacccgccccacccccacacacccatttaccttagaggagagtccaagacccaccaacatacctgaccctcgatcctgttaataaagcaggttcaggccctctcagagtgaccctgggtgttgcctctagtgtccttgcagatgtgaaaaggatggtggtttagggccctaatcagaagcttcccggcagaatgagggtcttgcagttgccttacttgctgaaactctgaagtgctgggtgtgaacctgctgtgagactaccccctttaaggtctgagcctgttaactccagggtcagcttcccccacatctgcactccctctgctgcaggcctgagctctctatgcccggagctctcttccttagagggcctgctctcagccgccacagagggcgctggagaactggcctgagcagagaggcagaaactcctctgcaggtcctcctaggcaccacccagagtcccctaagacagatcctcaatcacttatctctgcctgtgaatcaggaagaccagctcctcctactgtcttctgtgttagggatcacttccttgttgagtgggacctgagttttgagagggtcttctgctcctcttcgtctggtcccttacttccaagaccccagagaggaaggcatgctgttggctctagctctgcttctagctttcctgcctcctggtaagagtgctgcctacagagaggctcacaggttttattttgtttcgttttgtttattttcttcttttgcaagggataccatactaagaaatgcctcattacattttgtgttgttcccattgcagccagtcagaaatcttccaacttggaagggagaacaaagtcagtcaccaggccaactgggtcatcagctgtaatcacttgtgatcttcctgtagaaaatgccgtctacacccactggtacctacaccaggaggggaaggccccacagcgtcttctgtactatgactcctacaactccagggttgtgttggaatcaggaatcagtcgagaaaagtatcatacttatgcaagcacagggaagagccttaaatttatactggaaaatctaattgaacgtgactctggggtctattactgtgccacctgggataggcacagtgattcagacctgtgctacaccacactgaaaatctgccttgtgactactcctggtacacaagatagaccagcctcatctcatttcctgcccatgaattcactgtattctgtacaaagagaaacacagcttaactcctcatctctcccctaatatcacactcccctggcggcagctgcaccctgttctccaccccaccctcatgagttacctaaagaccaaactacaatctcccagctgtgtcagccaagcagccttgctgacagcaaagttctttcagctcttctatgggctggtggagacccattccacctgcttcctaagacagacaaattcctcaaggactggtctgtaaagggattcatttaggagactatatgggaagactagcttcactcaagcatttatccaattattgtctataggctaaaatagtgcttattcattgctcaggataaatgttggaataacaactttgcacttcagtaagacatctaacgtgtatcagatctgctatcttttggacacactgacatttttttctacataacaaatcatggtactattggtctgcaggagaatgggtaaaaaagtgatagtcataggtacgccaacttgtgggtcatatcataggttttcaaccatttcaagcatccctgccctaatgcaagtatctgaaggatctgacccttgccctgcagcagaattcattccatgtcccctctggatattagactgataatttggatcaggtctcagcatgggccattgaggaacactacagccctgctgagagataaaaaggattatccactcaaggagttcacacctccgggccgacatggagaacgtgcctagaagcagacttggagggtgctcagtggtgggttgtggaatgtaagcctgaagaagcagagtttaattctacgggggtgctttcataatttagtaccctgacagggctcctggtgttggtccttagacactcctgggatggctccctggaaacatggaggaaaccttggtcgcatgacatgatacggagatgttggagctgcctggacacagttacagagggaggcattaaaaggcttcgagaggtaggcatgctagagtggactttcccactaaacctgagaactcactggataactgtattccctgcgagagcccagagaaccctctgaattaggaaagaagggcatgttctgaaatgggaggaatcagcgttcttgagagtcttggtggaagctgtgccctgtggggcagggttgactataggagacgctgttaaggaattagctcccaagggtcaatggagatgatgtaatttcaaaataagagtccaaatgggcagaattagtgtgagaagacataaagccagaaaagcagccaaggagccctgctctacagaaatctggggtgacagctaataaaccacagtgttcctaggggtaaggaaattgggctaccacagtggtattccacatatgtattccatatatacatatatatctctcccatatatatatatatatatatgagatatatatatgagatatatatgggagagatatatatgatatatatgagatatatatgagatatatatgatatatatatgagatatatatgagatatagatatgtatatctctctcatatatacataatacatatctctctcatatatatatatatatatatatatatatatatatgtaattggaacgtattaagagaagatgaatgaaagaatgatgtcagctcctcctgttctccaactcagagtcctttgaatgaaggggaaggcagattgccttgagggagaaccttgtaatgttctagcaagtatatatggcagtgattctccgagccttttcccccaaaagatcgaagactagttacctgagaaatttgtacacctagggaaggggaataactaggtctttcaaggctgttggagacggcatctgagctaactttgataccaagaaatgcatactgtcaacgtggtcccccattagagtgaggacacatagaagctccccctctaatgctagttttaaaggcccaagtctatctaaaagggcagtcccataggtggatggactgactgtggtctctaccctgtgtctgaggatatcagagtggatatgatgaatggacataaaataaggaggctgcccccctacccccggatagtccaggcagccttcattcctttatttcatttggaacccatatggcttattctctttcactgactggagctcacagtctggctattgtaacctgtcttaaatctttttctctttaaaatatcttgactttgaggcaggtcttagaaaatgactcttcctgtctcaaaatgcagtccttcattctgattgatgaattggaagcacatggctggtgtaaagaataagaaactaattataagccaggaaacagcaggagaagaaagcagagaagcaacgcttaccctgaagaattaatttccgtttagaaaatatcacagctgatgtgtcaaaggccccggtatgcaggaatgagattaaacaaatgtggtcatgaggaagaggtttctgaataatgatagagaagcttgagtctacaagaaatccagagtccagaatactgcaggggagcagtgctgggttcatgtttatctggtctcttgtctattggatcctctttcttccagaaccctaaaccttgaatcagccttatagtcctggctcctagaagagtgtttctcaaagtgtactccacggaccacctggataagaagcacgtgaggcttttaattaaaaaaaaaaaaaaaagtacaggttctgggaagcatccaacacaataagacagaatcttggaatgaagggtgaaaatgtgcattttaaaataacctccagagctgattcttattcaaactgacttttaaaaactgctgcactagtggcaagagatcgaggggctgtcctgagcctgacacagaaaggtgttctagaaagctgctcacaggctccttcgcagcccaccaaatccgcctcactcttatctcccccagcccctcaaagcagctgctttgacagtttctcacatttttgcatgataatcccacaactgcaattccttctggcttcctgtgacctcacgcaagaaaaagttgtgtactaaatgaatctgctttaacttgctctccttcctcggggatcacacctttttaagaaagcctgtcccttaccttgaagcacaaacatattctcatttttattctcccaataccttgaaggttttcttctgcacatgtatttgtttgatctgccttttgtgcgtggggtgggagttaggtaggaatcttaaagtggagagccagtttcttcccaaattactgacctaacccatccttaacccccagttcaaggccacctttgtgatagtgaagcttccacatgctcactcagccccttctgctctctcttcttctctactgtgcatgtcggcttgtacttttgccagtttctctaaagacacaaccagaggtggggtggctgtgtgtgcacaacttcaactttacatgtggggctgagtccctatgttgtatatccttgtgcaaaagcacaatatgttaattgctatagcttttaaaaaaataattaatagtttttcataatcaaattttcttgcttttttgttttttcaaaaaagcatacttttattgaagaataaaccccttatatatgtacacttatttataactatgaaccatgaactaggatagaaatgcattgtgtatattacaaaacataacaaaaataataggggtagggaggtgcagatgttggtcaaaggatataaacctgcagttctatgatgaataagttctggacatctggaatacagcatggtgactatacttagtaatactatattgtacacttgaagcttactgaaagagtaaatctcaagtgttctcaccacacaaacccaaaggtaactatgttctcaccacacaaacccaaagggaactatgtattaattagcttgattgtggtaaccatttcacaatgtatacatttgccaaaacattatgttgtatacctggaatatataattttatttatcaattatacctcaataaagctgaaagaggggattactaattcccacaaaatacagatttaacaaaaacttttattcaacaaacagtgctatgaagttgtaaattggaaacaaaagaaataaaatttcatccacagtcttctcatcaaaacccttcagtggcattcctctttctggtgtcccagtcttgtcaattttgctaataactgtcatcctgggaatacccaatttatcctacatgacaaaatgacaaagtctgattagatgagttctcagattctagcatggccagaagagcactgtcctgggtcggataaatcacgtggaagatgcaggggatgcgtgactttaaaggtccagcccttagtccctggatcttcatgcaggggccgcctcagcctggatctgctcttcctcaccactgcagccctatcccacgctggctgaggtctgcttccacctgggcagtgactggatgacatgggatgagaggacacacctctccctcgcccagcatcgcatttctctttccctggagatctgggatcttggtcagaatccttcaaacgccacccagggcttgagagggcaagccctcctacaccttgactgcgttttgcccaagatttcccccatattattattttaaacgtgtctaatttagacaaatagaacctgtaagtgctacattgagaagagcacagggccaccgaattgggaagacaagtagaggaaaggaaagcaaatgtcaccagacagaatgtatggctgcaggtttacagcagattctattaaaatctatggttgggctgggtgtggtggttcacccctctaatctcagcactttgggaggccaaggcagagagatcacctgaggtcaggagttcaagaccagccaggccaacagagcaaaaccctgtctctaccaaaaatacaaaagttagcaaggcgtggtggcacgcgcctgtaatcccagctactggggaggctgaggcaggagaatctctggaacccaggaggtggaagttgcaatgagcagagatcacaccactgcactccagcctgagctaaagagtgagaccctgtctcaaaaaacaaacaaacaaaaaatctatgattggctgattggctattgctaacaacttttgagtctttaatgatcagtaattgaattaaaacggttaaaacaacaattgagagaaacatagttttgaacactgacaacacaaaataacttatccatgtaaccaaaagctacctattcccccgaaactattgaaataaacaaacaaaaaaattagaaagcggaaactttacaaaaattattctcaccaatgaggttgtccaaatgtcaccaaatttattatagaatagtaataaccaaatttgtgcatgaatcggtgatgacataagtatcttgtaagcattactgaagttttttttttttctattaaatttaccttcaagatatgccttcaggatgaggctttccactgcacttcattatgcaatgccatgttgacttggtatattacctcagatgtgactctaatatggtttgatttgttatgacgagactaaaatgaaacatatcacttttttcatgtgcatattgcaccttataagcacaaggtgcaattaaataaccaatttgaatattgaaaacatatgtagttgttataatttttttctcctctaaaataatattttcttatttctaaaaaaatctagaaaatagagaaagattgaagacaaataatttgcccatttccattgctcactgtctgtattttgcactttctacctgtcatttccctgcgttgaccttttctgaccatagctgtcactttctttcccattaccctagcccacccctgggctaaaggtctatagagtgtataaatgatagccccagaatatccctctgtcaaaacgttctgctagctttgtatttgaccaccttctcaccaactcagcacaaccctaagccctgcatgtgagaatgctgaaaactggaatcatgactttcagtttttgccatcgaagagaagctcaggaactgggtctggtcgtgggagcccagggactcacagcttcccttcccaagccagaccccttttcttgccatgcccacaaccttcccctcatggccatctctttgactactcaggaggtcctgggtgtcattagcaaagctgaaaatgaaccttcatttcagtaggaactcaaggctgggtctatttctccaagcctttggcaggtgtgtccttcgctggcccttcccaatgcacagtcttcaccatttccaaggacgtgccactggcagaggatgagctggtcctgcctccaggccctctctgtctgctggcctgacttagccttcttcctttggagacacacacacactcacacacacgcacgcacacacctggttcttgaaaactgcattagtccctataatttctactttgtgtgaaccccagagatcatttactggaacccatccagtttccaggtgaaacaacaacaccccacatttcttgagcatggtctatgcagctgggattgtgctgcgtgctctgctcacattctcctgtttactgtccatgtggccctatgacacctctctttacagatgaggaaaaagaggtgaaacaacttgcccaagactacacagctatcatgttattttagggcactgaaaatctccttctactaggacctctgggtgacacgctccgatgctggctcagacggttggcatgggtttttttagggattgctgttttgtgtttgtcccttcctctggagcaagcagcacactcattgttctctgagtataagatggttacatgaagcagaaatttgtcaccagcctggcctggcttctctcccaactctgattctctttaggtattacagccttggaaaagctacttaaaataacagccttactccttcatttctaaactgaagataacatttgtcctatagagttattttaggatttaataaagcaatggccctaaaccaattagtgcagtgcaagagttttgctggtgtccaaccaatgattgctattattgctaattataccagcaacactctttaagcctttttcagcactctagccattggtcatccctcccttcaccttgtggtcagatttctgtctctcctctggaacttctttcttcctcccccatttctctcatcagttacctccttgcaccaccagggaaatagcagttcaggccctaagctggtcgctaccataactcaggaaagtgtggctcaggtccatagtttgaaacaggtcactctgggctcctctcccccagtcaggatcagagatatggtgggctgccctgccttcctttgggtcatcctgtttccaggtcagtctcctacctaaggacctgtgtagaggtggcgaggctttgggacatccctacctcactgctctctccctgacagctggctggtggctcatcaggccggagcagctggcccatgtcctggggcactagggaagcttggtcatcctgcagtgcgtggtccgcaccaggatcagctacacccactggtaccagcagaagggccaggtccctgaggcactccaccagctggccatgtccaagttggatgtgcagtgggattccatcctgaaagcagataaaatcatagccaaggatggcagcagctctatcttggcagtactgaagttggagacaggcatcgagggcatgaactactgcacaacctgggccctgcgcagccttgcatgctgccccagccctacacaaaaggactcttcctcccgatccaacaaggccttgggcattttcacttactcttggtcccttgggtttccctgtggcatagaagaaaaaagtcttatcccctgtccctcacctccccatctatcctggaggtcccttccccggtcccactacagatgaggctttcagcttgtgcagactcagtgatctatatctcatcgaaaggggtctgtttaaagatgctccagttcagtgtctctgaagcctttgcaggatgacctgtgctcctgaatgcaggtgccactagccacctgtggctattgagcatgggaaacataccaagtgcaatagtccaagctgagatgggctgtgtgtctaaaatcatattttgaagctttagtgttaaaagtgagataactcttataatgatcaaaagttgaaatgattaggtatcttggactaaagccaatagcattaaaactaattttacctgtttctctttactttttttaatgcagcaactaaaaaaattaaagtgtgtgactcacattggtgactcatttatttctgttggacagtgctgttagagactgatcatttaagaatctgaccatctcccctgaagaatgcacaaataaaatattttggaagagatttcaagggtggaggacttgctgagatttaccacaaaatggttgaaaagctgagactagaagcctactcctgtttccagcttccaagctcttggccctgggactgttatcattttgcaatagagtcagcaattagaagcatgggaaacatgactgcccacttctcagtactttcacccgtgggcgggctgcataggaactgatgtgagtagacagtcgccatggcagggtgatgcagtcctccctggatgagacatttaccttccacttctccttcaacagcaccccagtgtggaacacgtgtgtatcccaagcttctctagacttttgttctcctatctgacaaatgagggggtttagccaaatgtctgctaagttatatgactatgatttttgtattaaagcaaagccatacacataagatcactatgcccactaccttcatataaagcagtcttttttaacatagaataaatgaaagaaaaaaaaagaaagcctgtgttactgatcctccagcaccaaacaggaaacccctctgctgctctatgtgcagaaaaaaaagaaattctttgaagtctaagctgaatttaaatgccttttcaagagaatgcttaatacactgttgatgagaatgtaaattagtacaacttctctagaaaacagtatggaaatttctcaaagaactaaaaatagaactaccattcaatccagcaatcccataactggatatccacccaaagaaaaataaatcattatattagactgcattcatatatttatcacagcactgttcataatagcaaaaatatggaatcaacctaaatgtccattagtggatggctggataaagaaaatgtggtatatatacacagtggagtactattcatccataataaatgtggtatatacacacaatggaatactgcttatccatacaaaagaatgaagtcctgttttttgcagaaacatggaggaagctggaggccattatctaaagtgaaacaactcagaaatagaaagacaaatactggatgttctcacttataagtgggagctaaataatgtgtacaagtggacatagggtgtggaaccagacattggaggcttgtaagggtggtggggggcagaaggaatacagatggaaattaagtaatttcacatcacaatgagtattatccaggtgtggggtatactaaaagccaagactttaccactgtgcattatatgtgtgtaacaaaattgcacttgtactccttaaatttatacaaataaaaaacaaaaggagaatcacttggacccaggaggcaggggttgtggtgagccgagatcgtgccattgcactccagtctgagcaacaagaaataaaaaaaaaaaacgctacgccttgcttctgaaacagcccagcgtctctaacctctactgaaggctcagttcacggctaaggccttccaacttgtgtgagaaggacagaggccatacaggaggaaactttcattctgttttggagttgttccttcatttcatttttctaattgtgctgataaaaccaaatgggcacagagaggagatgcctcctcttctgcctgccccctctctcagtgctttactccaaacaagagtaaatttggtgaaatggtgactatcagggtgtggccaaatggaggcgcaagctccccagtcacctccttatggaacaacatctttcatttcctcaagaggagactctgccactgcagtgaaccttcaccaccacaaacctccaccttcactcctcaccaacacctgctgtactcttcatgaatgctgtgagcttgagcgagttcttaaatttcctagccatcagtttcctcatctccaaaataaagaaaacagcaatgtccaaaatcaatctccctctgaattatactacctggtttcagcctcaacctccagggtgatagaccagcttagagaccaagattttatctttcctaagtgatctcaccttcagaggcatcatcaccagacttttcaagttttgtttcttagaaatggtcccaagttctttccctctcatcgtctcttgctttagggagcctcccagctagtctgtcttagcaagacaagggcatagctggtgcattgctgctggtgagcaggggcaagttcacagaaggcagcatgggagagtataacagaaatcaccatcagtttccaagggcttgctctgtgtcaggcattgccctaaacagtctacctgggcaaacatttattctttgcaacatccagtaaggtaggctgtgattttattctcctttggtagataagaaaacagaggcagagagaactactcaaagagctcaggctttgcagcccgatagaattaatcttaaatctgtcaccaacaagctgttaaaccttgacccattacctgacctgctttgagtagggctttgtgaagattatactaaatttatggtattaaacatcataatggctacaaactgcttgacacattaaggcattcactaagtgtccattgcttggtaactctttaaaaactgtattttaaatggtgatgttttgttaacatcagaacgacaaaaaaatactacaatggccatccattccctcactccaccctttcatctattcaacaaacacctgggaatagagagataaacagcacatgatcttactcccctgggaactcttaactgtcgtttagaatgagagagaaatgggtaaacaggccaagacttgggtaggaggtgctaggagagaggaaggcactaggtggcgtgaagagaaagcaatttgaagcatctccatcctggacttactgggtgaggtaagcttcctggggaagactgcctggggctgagcccagaaggataaacaggaattagccagggaatgtggagtagaatgcagtccaaacacaaaaaaattcaagtcaatccatagaagtgggtcgtggaattccaggcagaaagtgactaaatgaagatggaaggacagggagggggtggccacatcacagagaacctcttatcctaagaactctggacttcatcttcagaggcaaggtagagagagcaaggactttagagcaggaaaaggaccaggtcagtctagtggccatggggaaggtgggtgggaggggccgagatgggatgtatggaggtgcgtgaggtggaggcagtggtgagccaggaaatgtttaggacgtagaatcctcaggaattagagtgcggtgaattagaggggagaattgaggctgatgctcaagctcctggcttgggcaatgtgggtagttatgtcatacagggaactcggaagaagatatggtttgggggaagggaatgagttcactctggctatgagcagactttgtttgagatcccatgtcagacgtacttgaaaatgtccaagagttagctggatatgggtacagacagctttcgatttaactgaggtccgacttaagatttttttttactttatgatggtgcaaaagtgacacgcatttggtagaaaacataatttgacctttgctgtttccccaggacagtgatataaggttatgatactctcttgcgatgctgggcagtggcagtgagctgcagctcccagtgggtaaattaagcatggaaatctggaacacagcagcttttaagggatgcactggggagagcagtttgtaaaaataccttgggacggattaaatgtcttggcttagagaaagaacaacagacaataggaaactgtcattgaggagaagccgggattcaggagatgtacattattcaggtagctgagggaggggacaggaacctgaatcttcaacagaagcaaacaaactgggatggagggcccagcctcatgaaggtgaccagaaggacccggtgctgcaggctgtgtgggtagctgagcagagctaagcggcttgacggaccaacatctctccagctggttgaagacaagctctcagaagacaatgctgcatgtcacagccccagcaaccaacaacaccagcctgacaacttgctggggtggccgccttgtggtctgaggtggccgtctaaactatgtggtctgatctcaggctgcagaccttgcaggactgtcttcacacagactggaagtgctaacaggtggtgaggacaccgctttacaacgatgcagggggccccatgtcaccctcacccatgggaagtttgacttggtggactcagccaagccacagaggtctaacgcttctctgcggtgatttcaggctgccctggcagaaagcacagtgcctgcagacatgctgtcactgctccacacatcaacgctggcagtccttggggctcgtaagtagttttgctcccccaatcactttggactgatattctctattgttatatatttttataaattccaaattcttggtttatttactccctcccatttttttccccagtgtgtgtatatggtgcaggtcacctagagcaacctcaaatttccagtactaaaacgctgtcaaaaacagcccgcctggaatgtgtggtgtctggaataacaatttctgcaacatctgtatattggtatcgagagagacctggtgaagtcatacagttcctggtgtccatttcatatgacggcactgtcagaaaggaatccggcattccgtcaggcaaatttgaggtggataggatacctgaaacgtctacatccactctcaccattcacaatgtagagaaacaggacatagctacctactactgtgccttgtgggaggtgcacagcagcagacagtttgagccatcccattcaataaatgtttattgagtctttgtttataattacgaattgggaagccacagttaccaccagtgtgcttgtaaacagtttttaagataaacattcatgtggtgactctacttggagttgccaaattccacatattttctcaaagcagaagctttgcataagtctatacaagtgaccagcctcctctttttcagggttgtactctctcaccaacagcttttctaggtcacccatgcttatttttctggttcaacctctcctactcattatatattttttttctggtataatatatacacatttttagtgtgattcttttgtactagtcaatatgcattacataagttttctctgaccttcctatttctctcgattaaaaaatggatatgacattaaatggtattcatttttctggaggttaacatgtaacaaacgcagcatgatctaaccacgagcagggcagactgcaatgacaaatctatcacatgcatgccttgagtggtgatgtttgattttgtacaaaatccgtaaacacttccactaatcgaatctaagtcaaagtccactttggattggggtttgagaaaaaattcatttgctgcaacctctgcctcccgggttcaagcgattcttctacctcagtttcccaagtagctgagactacaggtgcgtgccaccacgcccatctaatttttttgtatttttaatagagacggggtttcgccatgttggccaggatggtctctatctcctcctgacctcgtgatctgcccacctcagccttccaaagtgctgggattacaggcgtgagccaccgtgcctggtcatccaaccatgagcttttgatagactactctgagccaggcattatgcacagcagaaattacaaggcccatacgctctgcaaaggcccgaggttgcttctgttgaaccacattctgctactgggctgccattcaccactaaaatggcagtcctcaacttgaatataactcatgattgtaagtctcttatgaattttcgttacttctagttcaactcaggctttgcaatttattattgttgatggtgttgttttaatttatgtttttgccatgaaaccctttcttgaaatgtgatcttacaaatataaaatagagaaaagtagatttccactgggaaagagttcagagatgaatgatccttagtctcatcttctcaaatttctctgatactttgatttttcaacagctcaataattatctgagtatacatataatgtacaaagtggtcaagacctgggcctgtcatgtcagaaggacataggtccaaatggggctctacttaccacggataagctgtgtggcaaggccttgagcttctctagccccatttcctcacctgtgaggcaatggtcctgtggttatcatatgggtggctgtgagaactcctgacatgatgcatttcaaggatttggcctagtgcttggcatattgtgacagcccagcgttatctgacaagagacaaaactagatacaacaaaaaaataacagcaagcacacatatatagtcatgtgtcccttaacgacaggaaaacatcctgagaaatgcatcctttggcaatgtccttgttgtgcagatattgtagagtgcccttaacacacacctacatggtacagcctactacatacctaggatatatggtatagcttattgctcctaagctgcaaacctgcatagcatgttgctgtactgaatgctatatgcgattgtaacactgataaatatttgtgtatttaaacatagcatagaaaaggtacagtaaaaatagaatataaaaaaaatgctacacatgtgtagggcagtttcattataatttgtccatctttgactgaaacattattattcagcgtatgactatatatacaagaaaacatacacacacacacacacacacatacacacatctggtttttttttttttgagatggagtttcactcttgttgcccaagctggagtgcaatggcgcgatctcggctcactgcaacctctgcctcccaggttcaagcgattctcttgcctcagcctccaagtagctgggattacaggcacgcactaccatgcccggctaattttttgtatctttagtagagatggggtttcgccatgttggccaggctggtctcgaactcctgagctcgtgatcaccccacctcggcctcccaaagtgctgggattacaggcatgagccaacacgcctggcccatatacacatctttatatatccagggcttagtgctacgtctatcatagtgtggctattacattttatagagagaatagctaagtatgaagaaactcttacaagaggttatcccagattaatttaattctaagcttttggtcatggttccctaagacctttgactcacacacagctggacaggacagtggccttgtgcatagtgcagatgaccattataggggaaaaacaagtcgaaattcatagtcctttactcctcctgcccttctccttttgcttaaggtgagcttcaccaggaacattttcgccacaccaaaggaaaactagccagaggcaaaccagctctaagttaatatttgccaattaaatggtttaagttttggattcacagaaacactgacagcatcttattagaatatactgtactgcatatagtaggggctcaatgaatatctgttgaattgagattgatactttcattattattgatgggttcattttacctaatgggtcaacgcgttgtatggatggatgccctgaatattctgatgatttgggttcgacttcttttcttttctacctgaggtgggtgagctacaatgactctgaataatagaatcaacattatattatctagttaatataaaatctgaataaaatctaaggaaatcttggaaagcaatattttcataaaccatatcatctgttgccgaactccccacacatacaagtactatggaaaaagtaatgtctactgcccaggagtcatcttatagaaaccacaattctagaagttgctgtacccacctggaaatccatgctgactgttttgtctcgggtgctttttgctttcagtcctgtgaaggggttcacaagaggcagactggggtagacaaaaaaagggcacagactttgaaatgcttatctccagacattgcgctcatgagtatttttatctgtgtcatttctgtacttttgaaatggtctaatagaaaacacattactttttaattttattttaaaattgacttaaaaaaagaattcctgttttataatattaaacatatccctgcacattattgagcacctagagacaatatgtaaaatgtgttggttagaaggacctggaaggggctctgcttgactactttttctttcctcttctctaacaacgtttgcttcttgtaaaaagcaaaatcttaccttttctcctgtttcctactgatcactgtgctgagctaaagaaaatgttagtgatttgaatgctcaaggcagcttattgggcttgtatgtcttcctggaacactaggatttttcaagcctgtagatcaaaggtcttgggaaaaaagaaacaacttttttcagtgagctaactgaaatagaagagaatggcgactcctacccacacctcttggatcctggacatcagctctggctgtggggcaaatggcactgcatattggccaatgtggggaggatgcagccaacttaaggccccttttcagggagggaacgctgaccccacgctcctatttcccagctgcctgctgatgtttccattttctacccccaaacaacacctgcaggatagggaagaccatccatgcagcccagggcggtcagacttttaaggcagagttatgtggaaaatggacttggatgagccaaggaggaaatcctgcagatggcccaataagtggattatgtttgacttcagataagtaggacaagctagggagccagaaggttttattagttttgtttcactttccacaaaaccaccaaggtcccatctccaacagaacaggatgtgtgactgttccttgagtaaaaaaacaggaaactggacaaatcttgagagatcatcattaattagtacttctttagttgatttcttaatatggaggagcatgtagattattaataatgcttttgttcttgagttaagtgaaggagtcttaggtatttgttgactcattaaataaatcaccaacatgtagtagactcaaataagaaacataaaagtgatacacatttagataaatgattatagtgctttatgcttgtagtgcttcatgaatcgatagtatgattaatccaattgtgctcgtagtgttctttacaacaactaagtttaaaatagagaaacaatctcaactctcattagatgattgaggatagagaaatgcctgtcacgttcatgtcaagtagaatttatcccctcacccctgttgctataattgatgtgtctcttctgtagatccctaatttaatttcttgtcacttttaagtcaacttttaactagcaaattagcaaagtgctaagggattcagagagattgaatcacgtgctatactttactgtagtcccgttctctttatattttacttataaactaaagttacagagtaattatcaaaactccatatttgtgttctgaaattggcagaatttgaatttgcagtccataggtcagcagatttctctgactttccttattttctttgcttagccacagaaaaacagaaaaatcagtgagtttacatgcacagaattaaatgtacagactattctctgaaagagctcagttctatgtgaaaatgaataatgtaataaatattcttatgagtgtagtaatagtagctattgtttattgagtacttcttatgtgcatggcactttatactgcatgctttatgtcatttgagcctaacaaaatactatcattattattatctcatttttatagatattttctttttttaataaactcttttatttgcacgtttgtgtcttgggttattcgtggggtgagaaacctccacacttccaatcccagccatctggtacaatctggtgttgtggtccagctgtcggcaaagggtagaggtgggtgcagggctggccccccagtctgcaccaacctcttcagagcagggagctcagaccatggttgtacttgcactgcttcagggcctcgctgaagccttcacacagggacaggtcactctgcgtggtcgaacagtccaggaactgccggatctcgtaggcgcaggaccccatctgcaggggctggggggcagcgcgtgtgggggtctgctgggcagcaggctggacgggctccgagctcccccatctgaaggctcaggtcagggcgctgcccatgacgtgtcccacagccgagcccacggctacccctgcggccatggacgccatctaagccatgaggctcggctggccggaaggggcggagatggggcggctgccggaggcggtggctgtgtgggggcaggtgggcagagggcgcggcgggagggggctgggtggtcggaccgccgcgctgcggcttcccagagacatggtggcggcggagggacccgggcgatcttaaatgacagcgatggcggcagcggttctgtcgcggggacaaatgccctttatagatattttctaagtacagatttgagactttgataaattaagatacttgatagtaagcagcgaggctgggatctgaatccaggtctgtctgactacaaaatctattgccttgatctcctacagtgatgagaaaaacaaaaccaaacacgaacttttaaatagagacatttcagggggaaataaaaaaatttataattcgttttatgagttttttttttttcatttgcggccttaagctcctttccccagggtcacatgaagttagttaaattgatgctaacggtgtttacttacagacaatctgcagagaattctctacagagaattttcttatgcaatcaagtttttctgacttctgggttctaagatttttttctttttttaacaagaaaaaaaagcgtaaccaaaactgtgtttattgagcaacagaaaagcagcgagatggaacacagagatattccccctgattatcacctttccgctgcactcccttaccctcagtccgctggggagcacagaaatgttatccaaaggtggatgggaaagggtggaaaggctgagacccaactgcagcctggcctgagatggccacatcatgttctgcttcctgcctggctgcccagggagggcctggatgggcagagggccaagtcagtgtcaggctgggaactttacatgcttttctcacttaaatattgtcatctcctttctcagaggaggaaccagagattcagagagactctgtagcctccaagatcacgcaggcatcactagtagcagagaagggatgtagagcaagtgtgacggtccataagacttactctcttcccaccacaccacactcacccagcaagaactggaataaatgacaagggagggaagaggggctcagacttctctgtatattcacaaggatgtggaatgtgttcctgtaagcgtacccaagttgggaatttggtcctttaaagaaaaaggttgaagcaggaagacttccagtttgctggatgaaacataatgcagcaatcaaacagcccgactcttttgagtgaatatcaataggaataccactataccattcacttgttcttcaaaggaaaaaatgaaactaatgagtccttgattccatgacatagataaatgttctgagaaggaagaagttaatggatcactgggaaggcttcatagagccagaagattcaagtaaaagtcttgccaaacaagaaaaggagaaagttcatttttgtcacagtctggttgcaacagtaaaaactagcttttgtcatcatcacattttctaatatcgaaaggacatattttaggaaaaagcatcccaaatttataggtatgttgttatttatagaacttcatttttttaaatcaaactcttcagtgaattaatttttaccacctcctcaggtacaggataaatgggacatttgcagccagtttcctccttgcccatgtttgctgcgaggtggggcgtggatgtggggaacctctctgggggaagaggatgggtgcagcagcccgacgactggtcgtgaggccccaccacaaaaagcctccacttaaagggcaatgctgagagccccaccacacctcatgatggggaattcctctgtctagagatgttatttattgtcattcaagtcaaggaactaaaatcctaagaaaaagagcataccccaaagccaaactaggcctcctaacagtagctctgtgctcatcctgcttcaacaaggaggcagagtagagaggaaggaggtgaaagatatggaacccactgagctcccactttattccaggcgtattatgcacctatctaagccaatgctggtagatagggatttcaatttcattttcatagttgagggcactgggtgtcagatagcaacaagtcaagctaacagcaggctgaactggaattaaaagcaggactgaatgattgcatgctcgcctgtatagcacactacgtggatttgcttggcattgaagaaataggttttagttccagctctaccatttactagctgagaggccttacattaccccctcttccccatggggaatcccttcctgcctcaaaatattgtttggattaaataagccaatgtttgtaaaagagttttggaaattgtagacaccataacaaagtaaagagttatagttttttttaaacacattttcattcattctaatatgatttctcatatgaattatctcctaaggatagtcaatatttatggagctcccactatagggaaggcatccttcttgatgaaataaggggctttaacaatccctacaacttatgactttgacttaacaaaaacgaaatctagcatgtgttatatgaaagtagcaggtaacaagtggtctagcaaagctgcagtgctatatgctgagtgatagaggtatttgttgtaacatccactccaattcctcaagaaaatagatggtggcaaagaagattaagtgatattgctcattaaatgatgagaatttttacatactggatattcagtgggagtttcattttgtcccaatctccgctgacactctaagctcaggagaatggtagtaatacaaaagaaggggacaaaaccagagattcacagtggagggcaagcccctctccagcagacattggtaatgtctgagacattttttactgtcacaaacagagtgagaatgctactggtatctagtgagtagaggccagaagtgttactaaacatcctacaatgcacaggacagccccacaacaaagaattatccagcccaaaatgtcaataatgcagaggctgagaaaccctggggtagttggccatatttctcaaagacttgctaagaggtagacaaaactgatgactccaacctttggctcatgagctatatccaggctaattacagtaagagctttcctggggactctaattttgcaaagactttctctgaaaagcactgttgggatttccctggaaaccccctcctctcccagtgaggaggtgatgaggtagctcttctacttccacaccaaataggactctcaggtcctacatccaccatgggtccagagcagagccctgtgtgtgggtcatggaagtgttgggtctgtgccgtgagcgtttggtggccagataaaccagtgaggactctcacctggaaaagtggacaggtggcttcaggtcatagcccacgtggtaacttggaccaactctcccctgaaatcagttagataatcatgatgaaataataataatgaaaaagaatctttctaaaagtttctaagagttagcaagataacaaggtgaataacttttaccctggcaaatggactgattatcatggtgtcatacagctatgggtaaagttcccatgtgatcctgaccaatcagcaacctcagaaatgactgatctgggcgcagggcctaaggacacccattttctctgtgaacactctttgaggttccccttcctcatcctggtgcagcttctcctgctccaggttccctatttcctcagccttgtctcaggcactcagcctgagcagacgggacgtcacagctacagatatgcacctgttcttcactctgggaatgtgaacttgttctcctacttctcagattggctgagggatttttttgaaaatgaatgtctcatttcttgataactttggtttcattgaaaatgctattttgtttctaattgaaattgggtaaaaacaattgaagcaagtaaaaatctttatttcattagcagaaatgaagcatatattttcactgtagggtatttagatagaacttttcatacacactcaggtactgaccaacaccaaatcaggcttttgaggatttgatatttacttggaaaaaaaccctgttccaggtcaattacaggcaaagagctgcaaccatatataaaattctgtatataaattctctatataaaattctgtctacttccctttagttcttaatataaaattcctagaaaaatagaaagacatgatgacccaatataatggcccccaggaaactagcatgacattggagctgaggtaatgggcacttgccccattatcatgtctgcgaccacatccttcccaatgtggaagagcctcgtccagccctctgccccagctaggcctcagcctcagcttgcagcacttcctgtgttcctcagatgatgcctctgtgatcacaggaaaccagaaagggagtctgatgactatcaatttcaccccacaaatgccagtacctatacccccaagtgtctgatttgacatcatttcctattgacttaggttcctatttagagactatgtttgttgaaactgcatgattatttcagagagaaagcaaggtccattatatcatttcttagaaacttctagtcatggtgaattgctcagggtgaagatgccagcaaggaacaagatggaattcatatccactcagttcccactggctgccagaaaatgggatagatgttctacatattcagaatttcaggtgattgtcataagaacctggtaaataaacttattcatgaaagaaataactgatgtttagacaggggcagttatctgtccaaacaaatagttcatgctctttcaagtgcactattgggccactttgaataccctttgggtttattaacttaatggaaatagggccaggggcagtggctcaggcttataattccagcgctttcagaggctgaggcaggcagatcatttgtcctcaggaattcaagaccagcctgggcaacatggtgaaactccatctctacaaaaacacaaaaattaaccaggtgtggtggagcttgcctgtagtctcagctattccggaagctgaggtgggaggatcacttgagcccaggaggcagaggttgcagagagacaagattgcagcactgcactccagcctgggatacagagcaagactctgtctcaaaaacaaacaaacaaaactttataggaatgaactgtggcatttgtgggtaattatgcgctggcccggacttactgcctagtcctgcagagctaggtcaagacagaatgggcagtgactcaagacagaatgggcagtgactcaagaagccatggctaaagggtcatgctgaacacacatttggaagagttcccaccccccaccccacccccaccctgctccccaccggcattctgccttaggacccttcttctcactggaggggaaaaggctaagaaaacagaaaaccctctctgttcttgtgaacttgctttagcagataatatcatgggtgggatacctggagagggatcaaaacctcacagcccagacttaagtaaatgatcaaaatgtgtaatgaggatcatgttttggaaatgtggccaacatatttttattctctaaaataaatcatgtcaccttttgtcctttctttattgtagctaatccatgatatttactacccatagaaagagatggtagttgcccagaacaaactcacttttttttttttttttttttttttttgagatgaagtgttactctgtcgcccaggctagagtgcagcgcacaggcgcccgccaccacgcctggctaatttttttttgtttgtttgtttttagcagagacggggtttcaccgtgttagccaggatggtctcaatctcctgacctcgtgatacgcccgcctcagcctcctaaagtgctgggattacaggcgtaagccaccacagcctgccacaaactcactttttgaattaattgtgagatgttgggcttgaaaatcaggttcaatttttttttaaagagttttctatagttgtgattctctcattcataggtcaaaaggccacactggcaaagtaacaacacagaattttattacagctgctagatatgaagactcagcatatgatatcggtgacgttaataccttcccagggagaagcgctgttccttctggctgggaagtgcgagccggtggggggagagagaggagtagagcattatgtggaggtacttcccggttcccttgcgtctgagggtcttatgccagaggggatagaaagcccaacagaaactcaagatagaagaaggagaatctgcgagtgtctgtctcctgtcaagcttccctaatacagccctggtagaacttcatcaacagtggaaggcatttgcaaaggtgagcccaaaccagcacccctttccacacaggctgtccatgtagaaggcccagatgcttctcagggtctctgagaggatacaaagctactgagggggccagagggcacagcacctgggatttggatgagaagctgcaggaagggaactttgcaccccaagggcatggtgtggagtcaatagtggcaagttcagtctggttttttacatcagccggttcagaggaagagtgaaatccccaagatcagcagggcaaaatgctggaagttgtcgaggatgcagagagtagcaggaagacacctctgagaactcactcacacaccctgcccctgtgtagagatgtcatcctggggatgagaaggaggaagacagagaaacgcagaaaagcctaagcaggcaccacaaagagaccgagcccgtctgaaagaggctgctctaacctggtggaaactattttaagttggtaagtttagtgcctccccacaatatcagaacgagcaagagacgacaggtataggttgtgtacatttcccctctgcgttgaatgatagcgtgtgcgtgttccaccactgtgccctgctcaaagttagctgggtggctgtgccctgctcaaagtcacttgggtgaggggcgcccgtgggagccaaaaatcccatcttacacccaccccctgcacactctggagttgggctgtgacatgctggagaaaggtgtctttgtctaattattctgcctaagggcatgccttttgttaattagtaaaaggaagccttatttgtgctctgcagagtgggggtgctgtttaggaggtaattcgtgatagaaccacacagacaagatagattcaatttaaataaattgaatctatgaagcttcctaaccccatggaaacacaaaattagtttacacaaaaataatcattaaagaactaatgaaaataatgtttgaattcagccaccagacattacattccagagccttgagaaaaactgatgaaaaaaaagtcatgaaaaaaagtcattcgcacaagtgacaccatggtgtgaagtcaaggagcacagactctggagtcagagggcttgagtcaacctgagcatcttcagctttgactgtgaagacacagctttgactctctgtgttgcagagatggtagtgcccactccagtgacgcttgtgaggattagttgagataataaatacaaaatgctgagcatcaaacctagagtagagaaaggtctcaagtaagtactcattaccagtatttgttatttaatttcacttttgtctacattcccttgtgtgaaatggtttggataattaattaaggaaaactttccctcagggacattgctgatattgcaatcttcactagatacacttatctctacctccgcctccacctccaccttcacctccatctcttctctgtctctatctctatcttcctgttgtttatctatctaattatttataaatgaactggtgggtttgttgttgttgcagcctggctaatgttatccagacatatctgaaacctcatgagtggcatggaatggcagtccctgcttgaaccatttacctcctttcctaacaccaacaatcacacacacctgacactgacctgaagcctctggcctgtcctcggaggcaaagactgggtagacaagatgcctggttaccagcaatcttctgcaatttcctctgagctattgagattgcttttctctttgctcaaattatgtgagaaacttttaaaaaagaatttaatgtgctcttttgatatttcaggtgttcattcaaaagcctatgttattctctgtctctctgtctcttttcctagttgggtaatcaaaatggcacaatcagaaatatttatatctgcaacagaaaagaagaataaatttattcatgcacaagtacattatgtacatatatatgtttgtgtatacatatatctgtataattgatatatttgggagaaataaaaggtttcattaagcacacaagttctagagttagaccctctgtcgcaaattactgtcctgtcacttaactcctgccagaacaaagtgcatacttgaacaaaatgcctgctctgtaaaaatgccttgatcttgaataaaatgcctgctaggtcaaagcttctattttcccacctagaaaatgggaacaataataagaatcctcacttaatagataatggaaaaagttgcttgcagcacagagcctgctacagacaatgccttcaattaatgcaaactattaatattatgaaaagtgagtatctgttttctgacaatgttttcaataatataaattctgcctttgttcactttatttgtttgaaaaaacaaataaaaaaccaaacaaaaaagtgtcttaaaagtgtccatttgtctttcttcttgactcctagtaacgctttcctgtgtttagggaattttcacctcatgggttttggtgagtgaatgaattcatctccctctacagaaaagaagaatgcctgatgcattttctcagcctttattccaggtagtcaggtagactatggactccagcaattagatacactcctcacaacccctccattacacacacacacacacacacacacacacacacacacacacacacacacggctgctggagttgcagggtctggaaggaactgtctggcagggatggagtgtgcagggtgcctagtgagttccagcgtggccgtggctgccctggctgtggcagcaccagggctctaagccgggccctgcagactggctcaatctgcagcatgggcgctctctcttacttcccattcccaggacacatcctgtgcaggggaagagtgagtccttctagttgtagccacaggcccattggtctgctgacctccacctcctcaatattcgactccccagcattgagtgtctcaaaaacagtatttttcagaaaagagggtgaacagggcaactgctttaggaggagccatccgagccagctgcttcctctcctgtctcctagggaggacccaagctgtcggagttcatacctgtcccacaaaacacgagccagagctggacaaaagtgacagggacaaccactgtccaaggttaagtgagccctgaggcaccagaagatctccaagaaagccacatggaaatcataaaatggagctgaatggaggaaaagagaagttctgtaatgtggaaaaatgaagtactaacaatatttgactgttttcccttgatttagccaggttactacttcaaaacagtcagcaaagcattttaacaatgaaagctgttggggaaattaaatggctggaagtggagggaaactgtgcattgtggtgcatgcctgttgtcctagctactcaagaggctgaggcaggagggtggcttgagcccaggaattcaaggctgcagtgagccatgatcacaccactgcactccagcctggccaacatagcaagaccctatctctacaaaaataaaaataagaagtggaggggagataaaaatgtagtggtaggagtagtagtaataatatctaataattactgaaaatttactatatgtcaggaactatactaggtgtacttagctatttagtctgcataaaattttaataccagtgttattattgtatccattttcagatgagagatttgaggcacaaagagattaagaagtttgcacagggtcagacagcccctatgtgataaagatgaacagttagacattaaaacatgttttggttgggtgcagtggctcacgcctgtaatcccagcactttgggaagctgaggtgggtggactgcttgagctcagaagtcggaggccagcctgggcaacatggtgaaaccccgtctctacaaaaaatacaaaattagccaggcatggtggtgtgcacctgtattcccagttactcaagaggctggggatgaaaggattgcttgagcctcagaggttgaggctgcagtgagccatgagtgtgccactgcactccagggtgggtgacagaacaagatcttgtctcaaaaaatatatgtaaagaaaaaattctccaatgacatgggaagttgctcagaatataagctgaactgaaagaatacagaacactatacatgtaaatatatctatagtccataaaatcatattaatattcatgtatccaaaatgaaaatatctacaagtgagcatatgataatgtgaatagtagtgggcctttgtgatatgaccgtagatgtttttattgttatctttccccattgctctgagtttcttcaatgagcactgttaccagcatgttctacctatcagctgtgtgacttctgtggagttgatgactctgtgcctcattccctcatccaaaaaatgaaaattccaagtacccatattaagtgatcattgtgaagattagaaggtgaaaaacgtttagaaaaaaaaaaggctagcaaatagaaaatgctcaataagtatttgctattataaaagttaatgtttattaaatatgcaacaatttaaaatattatgctgaggaaaagtgttcacgaacaactcctaggcaattagaaatccttctcatttccacagaaattaagcaacccccatggccccctcacattcgtgcagagaacaccatcgagattgctagcctgatttgagataagcagggtgagcaggaggggggctcagtgctgagcctgcaggaggcactgaagggcccaaaaaaccattttctttctctccccagttcaggccacaccctccagaacctgaccagagtcgtctagccaccaggtccgcactttcctgccttctccttgggtacaccgccccgaagacaggatgtcactgctggaagcatttgccttctcctcctgggctcctgagttgctgtccgaacatttcagtctagctgcgtgaccaaaatcattcttcaatgtttccctcttctactgtcagatgttcattggaaattctcctcttttacttacagttggacttggattatcaaaagtggagcagttccagctatccatttccacggaagtcaagaaaagtattgacataccttgcaagatatcgagcacaaggtttgaaacagatgtcattcactggtaccggcagaaaccaaatcaggctttggagcacctgatctatattgtctcaacaaaatccgcagctcgacgcagcatgggtaagacaagcaacaaagtggaggcaagaaagaattctcaaactctcacttcaatccttaccatcaagtccgtagagaaagaagacatggccgtttactactgtgctgcgtgggattacaccatactagaactgttgaaacaacatgcacaaaatcccctcccagggtctgtgcccaccacatccttcccaacaggggcaaccacagccagtccccagctgggctcccagactcaggctcgccttctctgaggctcttccggggctttccaggaagctgttatgggttataccttcgttcccacctgatcccaggacttgtgctccagaatctttatttgacactgtttcttaatgcattaaagacttgtctggggactgagagaacataggtcgtgccactgtccatcatatcaccacctagagacttccagtaagtagcaaggtgcagttgagacagggatccttattacgtacagtcaagacaacccccctgcaatataactatcactggcccagtttacaatgaaagaaatgaaagcttagagaactgaggttgcatgatctgccagacaagtcatgtctttgagctggtctatgagaccacaccgaacagtttaaggattgcaattctctaagtaaatgctaggatatctgggataaattcgggaaggagtaagtgcccttttttctgggaggggtagggaggagaatttgcctgcatgagatcgtcagaatagagctccaagtcatcccaggggccattggatgagacccttcatgttggaataacctttggtcttacctgtaaaggaagagagaattgtatcgtgtgtgtgtgtgtgtgtgtgtgtgtgtgtgtgtaagttctctacagtgttctcaattctttgcatatattagctcctttaacccacactacctatagtgtctgctctgttgttctcatcaaacatatctaactcctgaaataagtggagtattagttcatgcacttgtccaaatcacagagctgataggtggcaggacagcctagggagggacccaggtaatctggttcctcttgaatatgacactaaactgcttctgaatcacaggagtataaaagaaaagacacattgttcctgtccccatggaggagacagaactgaccatcatggaacagtaactgacacacattactaccgtgtgctgaaacttgtgcccagggttccagtgattaggtgtattcagagaacaagtaaaatgccaataaagtaccaaatgacttttctttctttttttttttttttgagactgagtctcgctctgtcgcccaggctggagtgcagtggcgccatctccactcactgcaagctccgcctcccgggttgaccccattctcctgcctcagcctcccgagtagctgggactactggcgcccgccaccacgcccagctaattttttgtatttttagtagagacggggtttcactgtgttagccaggattgtctcgatctcttgacttcgtgatccgccagccttggcctcccaaagtgctgggattacaggcgtgagccactgcacccggccaccgattgacttttcaatataaaaacataagaaatttgggttttccatatctaggtacgtgacaggtactgttatctatacttcatgttcattatcattattatgtgatcatgtaaatttcttaagtctctggaagccatttaggcacttatagatgtagaactgagacctaaagatttcaaataactcagctgatgttagatagggtaagtagtctagaagggtgcatattgtcataggtcattaatagtaatattcagatgagcttttgaaggacctgatatatttttaaatataaaattaaaagatcagaatataaaactgtaaatgtaaaacccattaaaaaacgtttaatcatggctgggtgcagtggttcacgcctgaaatcccagcactttgggaggccagggtgggcggatcacgaggtaaggagtttgaaaccagcctggccaatatagtaaaacacgtttctactaaaaatacaaaaattagccgggtgtggtggtgcacgcctgtggtcccagctactcaggaggctgaggcaggagaattgcttgaatccgggaagtggaggttgctgtgagccgagatcgtgccactgtactccagtctgggtgacagagcaagactctgtctaaaagaaaaaaaaaatttaatcctgtgatcctgtgtaatgatccaaacaaatatattactatctacaaatgtgtagagaacatgcttaaaagtaaattctgattgctcttattttctttattttaattaactaattaatgttctactagagtcttctcaaaatattttcatcattttgcaacatttggtcaggttttcttcagtgaggattgggtagttatccaagctcccatgtttaccaactttgtgatctgggacgtcatgcgtgccacactgttcttgtctatcagagagagataataataccactgcctctcaacgctggtgagaagtgtgaaggaagtaatggaagaaaacgtttagaacaatgttagcaagtctacaatagatgtttgatataacgttaattttaaaggcttatgattacacataaaaatgaactttatttaaaaacacccctctctgtgacatagtgttcatgagatagttctgaagtccaaggtgagttcccacagactgccctgtcggtccctccagcaatttcaatcaagtttcctcttgaggtgcaccctctttataagtgaaattggatttctctgagttataatctgcattgtgacatcccaattaattataaaccaaatactttactgtatttcaaacagaaatgactatagctttttaaatgaggtatgaataatgctagtgtaaaatttcagtttgccttttttaaaattgtaaaatactgtccatgttttatactcctgagtcctgcatccccaaaacattaacagagggatcaatttttacgtgaggtaaagaaagttatatgcttatatatctggaaaaatattgtacagtctgaaaatcaaggagagaacagctaagtttgaagcagaattagttcaactccagagctgctcccatccctttccacagacacattcttgtcaggtaatgcaccctacaccccgtcagtggtcagtgtaatgctcctgggaactgctcagctcttcagtaggccatgaagtccccagagggcacctgacccaccacatttttctctctcaccaagtcatgccatgctgtctccccactgactggggccagccagcaaccagggtccttctcctggggatatggctcagcagacagcaggatgtccctgctgagaatattcatatttttctccctctgcagcggtgagttgctcctcaattatttcaacatagatgagagatgaaagtgattctttttttcttttattttaagacagtctcgttctttcacccaggctggagtgcagtggtgtgatctcagctcacttcaacctctgcctcctgggttcaagcaattctctcttgtgcttcagcctccaaagtagctaagattacaggcatgcgccactgtgcctagcttatttttttatttttagtagaggcagggttttgccatgttggtcaggctggtctcgatctcctggcctcatgtgatctgccctccttggcctcccaaagtactgtgattacagtcatgagccaccacacctggccagatgaaagtgtttcattatcatttcctctttctatgtcccaggttcatggggatttctcttttttgtttgcagttgaacttggtaagttaaatttaaagcaataaaaaatgtcaactacatttttgtcaacagagcaacagataaaagtgtctaggtatcttgtgtggtgtccactgaagactttgtaaatatagttatacactggtaccagcagaaactgaatctaaattatgagccatctgacaaatatcacttcaataacaagccccagttcgagtttgcttaggtgagaaaaacaagaaacttgaggcaagaacaaattttcaaatgtctacttcagtctttaccataaacttcataggaaaggaagatgaggccatttactactgcactgcttaggacccacagcatcagtgccacactgtcccacacaacaacctctgttgggtctctgcccaaccacatccttcccatgggagcaaactctatggactcctagctgggctcccaccctcagccttgccttctctgcggcacttctggatctttctgggaagccatcttgggttaatgctttaagcaggaagcatgcctgatcatgacgttcccagatattcattgaacactacttcctaatgaattaaggtttggcctgggaatgagtggacacaggctaaggtcccattcctgtcagcatccagataattctattaactgcaaacggcttaggccaagggagagaatcgttgtgtataggaatcccatatataattatttcaacacctctgcaacagaactattatttgcccattttaataaagaaattaaagcttacaagttcaaaatgactggtcgaagttgagaagtgcatgttttttgttttttaaaactggatcatgaggccaccttgaatatctaaaagtcacagttgtacaacagactctttgaggtgactttggggtggagcaagtgtcttttttctgtagagaagaagatggttcctcacttcacactaaggggtgtgacagtgtgatatcatcagaaaagagccccaggcatcggactgttaaatgagccatactttgcatttattaactcctttaacctctggcaacctctgaggtctgttctgttatgaacagaagtgcattttactcaggtaagtgagatctatttgtcctagccactcatccaggtcacacagctggttcatggcagtgtaggattggacccagctagtctggctccagagtctgtactcctcagtcacagaagggtaaagagaagtacattgttcctactcccatggagaagacaatactgacaacttctgtaaaacatttactggcacaattattattttgaactgaatcaggtgaccagaatttgagcaattaggaatccttgttgaataagtgaaataccaataaattatccattttttcaaaatataaagtgatacaaattcgattattttatgatgccatctctaaaataattgagaaagaaatgaagaatacctttaatccatgtacttttcctatagcagtacatactaggcacccccatggaaaaatatagataccaccttgcattcgtgccacgtgttgtcttacttattcgataatttccaaggtcaggacaacatattcatcctcatcatccccttttccaaggagccaggaaggctactgaaggaaataaagggggttccaggaaaggctgacctggggctggaatcagacaatccgtcatcctttatcctcccaccccgatgcactcagccttttgtgatccacatcctgtctgtgtaattcctgaccatcatattccctcagggtgggccacacttggtttcttgaacctatatgggcctttacttgttaactttaatattagctaaagtagacagtaagatctgaggaaaaacacagcgaatctgagaggataagctgttttcagacagggatgcatagacaggcttgcggaaatacttgtgtcaccctcttctcgtggttgtctcatctactactcaaaacagcctcagagagcagcaatgaggtatccactgccagatccctgtgtccagatcatagagcagagctctcctgcagcctttcaggcatcagactaaatggtgagaaacagagaaagagatactagattcatagtgcattcaaatgacagaatactatgcagcctgtgaaaatgatattgtatgcatttattaataaaattcaaacatcttcacaatacaatgtaaagaaaagttcttgaagtgtacaaaacctcttaaaaatataaatgtctgtgttgatagaataattttttaaaaacagaaagaaattatccaaaattttagaataattattcccgagggaataattatttaaattattctatgtacttttactaatttttatatattttcttaagtgagatactaaggctttgttgtaagatatacttaacaaagtaattttctcttgtttggtagtaatactaagacacgataacgtcattaaggactcatgctgtgccaggtactgatatctgagtattttatgcattaccattgtgtaacacgataatataagccccttagtacctctagaagatatatatgtaggcaaggtacacatgtagaaactgaggcccaagagcttaaataactcagcccacattctatagggttaagtggtataggagtgtttaattgtattcggtcactaaaaataatgtgcacatagactcaagacctgcagtattgctcatgataataaagtaaccaaaataagagagtataaagccaaatatgtaaatcccaccgaaatatatacatatatcatatgtataaataataccaagccattctatttcttttttaaaaatttttaacttttaagttctgaggtacatgtgcaggatgtgcatgtttgttacataggtaaacgtgtgctgtgtggtttgttgcacctatcaacccatcacctaggtactgagcccagcatgcattagctatttttcctaatgctatccttccccacaccctgcccgccaataggccccagtgtgtgttgtttctctccctgtgtccatgtgttctcatcattaagctcccacttataaatgcggacatgcagtgtttggctttctgttcctgcattagtttgctgaggataatggctttcagctcatccgttttcctgtgaaggacatgatctccttccattttatggctgcatagtactccatggtatatatgtaccataatttctttatccaatctatcattgatgggcatttgggttaataccatgtctttgctaccgtgaatagtgctgcaatgaacaataccaagctattctatttccaaccataaatatgttgagaaaaattcaaaggaaaagtaaatgatgggtgccttttgttgtcaatttttatatctcattttactcagattttccttaacggatgactgctactcacctgagttcttatgtttaccagctctgtgtttttgaatgagtcactcaaactctgtttgccgttgtcctcatttgacacatggagataatcataaaacttactgcacaggactgttgagaggatcaagtaaaataatataagaaaacatctagacaagtagcaagttgtaaatggatattagatgcttgtcaagtttcttactgcagttctgaattaacagctaattacagaaagatagtcattgggacagaacactgcaggtttatcttcacattttcaaagccatatttctgcaatatggtactgctggggaatgggagagtgggcaagagaacatccctgccccacccctagaggtacacattcatactaggtatttctttccagatagttaacccacttacccgatctgcccagcactcatgggatgcaggaaaccctggaactgctcataactgtagcagctcatgaagaaccctaaggaaccacctcatctagtacttctgagagacctcaacagccccgccttctgccactgacttgagacctccagtgaacagggttaccttctccctggggaaccagactggcagaaagcatgccactggtagtagctgttatcttcttctccctctgggtttgtgagttgccccctaatcatttcagtctacagaagagattgaagtcattctgtattattacctcttcacgtatcgttggcttatgggaatttctcttcacttgcaattgcacttgggcagttggaacaacctgaaatatctatttccagaccagcaaataagagtgcccacatatcttggaaggcatccatccaaggctttagcagtaaaatcatacactggtactggcagaaaccaaacaaaggcttagaatatttattacatgtcttcttgacaatctctgctcaagattgctcaggtgggaagactaagaaacttgaggtaagtaaaaatgctcacacttccacttccactttgaaaataaagttcttagagaaagaagatgaggtggtgtaccactgtgcctgctggattaggcaccacagtgttagagttgtcaagataacctacacagaaactatctccgagtctgtgcctgtccacatccttctccatgtgggcaaccacagcggtttgctcagctgggtgcccagccggagcctgccctccctgcagctcttctggaatgttgcaggaagacatcttagattctgctcccttggtgtgcagaatcacattggtgattcatggtgtccaaacgggaaaagttttcttgttccctctcagggcgtgcgataaggatgtggctcccttcttggtgcccctctcctcaaacctctagggggagcatgcacacgtgcaggttgtggggctccgaccccacagcagtgtctaggggtgaatgcttataactcctgaggccccagtgggcctgtgttacaaggtgtccttttagtttggctgtccataggtgacttgctttagccagctcaattagaccccctgccttattgcaaggacggagggctttctgtatccctgggtttcttgccttggtgtactgaaagaattggataacatgtgggcttggagaatgagtgcaagttttttatttttgtttttgttttgagacggagtctcgctttgtcgcctgggctggagtgcagtggcgcaatctcggctcacgcaagctccgcctcccgggttcacgccattctcctgggcagtctcccgagtagctgggactacaggcgccccccaccatgcctggctaattttttgtatttttagtagagacggggtttcaccgtgttagccaggattgtctcgaactcctgacctcgtgatctgcccacctcggcctcccaaagtgctgggattacaggtgtgagccaccgcgcctggccgagtgcaaggttttattgagtggaagtagctcttagcagatgggggagccagacgggagatggagtgggaaggtggttttcccctggagttgactgctcagcggccaggctttcctccaaccaccccgccaaactctgctttgttctgccagtcgatggcctgcagcccgccagtctcgccaaactctgctttgttctgccagtcgatggcctgcagcccgccagtctctgtaggtgtgcttttccacattagtgttcctctcgatgtccagccacttgtgtgtgtgcccactagggtctcaggggttttataggcacaagatggaggcgtggcgggccagggtggtcttgggaaatgcaacatttgggcgtggaggcaggagtgcctgtcctcacctaggtccgtgggcacaggcctgggagtggggccctcgacagggaccacgtccttcctttccctgcacttccctcccccaatcccatatcagtgtcagcaattaggatccaaattagggacattttgacactatttcctacaacattaggatatctgggaactctgaaaatacagagtgggtggcttagagcaaaattcatctgtctagtaattcgctacgtagagatttctagtaactggttcagaatgaaagtaggaagcagtatatattttacatagatattccctgctgttatcattattttcccatttggttcatgagcattggaggttttcaaagttagagtgatctgtcaaacatagtaactgtgtgctttttattcgcacctgaggccatcctgaagaaatctagggacaagtaagtagatctgtaagtaaacaatcacctgtttggggtatatgagagatgaaagtataaatcctgtgtcctagaggaagagcatgcagctcacttcacactcagggctcagtgctgggacaaaacaagcactgtgcagtggaacccagctcctaggcacagtgggggatctcaggatgggggctatgctttggagatcttgtctttcagggttctgcaaagaaaactaaaaatcctgagtaaaataggattagatagttaagaagaaagataatacatgcttcctgcatcggtaaaggaaataaccataataatacccctcagaaattaataaataagaaataatgattgacaattattttatgtttattccatgattaatcattgggtggttgggaactttcaaaaaataatgaaacaaaatataaaactgtaaaactgtaaaagtcctctctcacttctttgaaactttcaaacaacaaattaatgatgaaaaatccggagtttcaaagattttctcctatttatacctttagtactatggatatctgacagcatattgccatacatgcagtctacttacagtccttgaagtaattgcaacgtattttttctccattctcccttctgagaatcagcttgtaccatcctgataggataagaggagaaatgctattgaaagcccaatgagggaataccaggagcctccatggcaggtcagcccctttccaggtgcagactcagaatctggagtcccgcatcctgtccgccatgattcctgaccatggtggtccacagggagaatgacctgagcgcctgagtgagtcctcaacagacctcacctctcacctgatgcatacataaaagcaaagggaagaagattgttaaggaaatacagagcctgagaacatgaacttttcaagaaataggtgaatgaaaagatggaattcagcttttcacaatgtcagtgttaagtattttacatggattattttatttaatcctcaaaagagcagtgtagagtgactgtagtggccacacaaggtcaggtcttagaagatgcagtcactttgactttttaagagactcctgggagatttatggggaagaaaacttagagacacactagagtgaggaagaggaaggaaagagacaccgtatctgtgtgaatttaaagtaatgaaatactatgtagcaattaagcagtgtttttgaagaactataagtaaaattgaaaatattcaccatgtatttagcaggaggatattgaacacagaactgatttaaatagtaagctctcatgtacatacatgtatatattgaagaacgagcaaaaggaaaaaaattctccaaagtttaaagagtgggtgtctctgaaaggatgggtgattttaacatcttcttggtacttgcacagattttacacattgtaacaaaaagctgctactacttttaaagatgtatgccataatggcttcaatattttattgattcatgcatttaataatgaaactgtttatataacaacataaaatataactatatatggcacacttaaaattatttttatgtttttccacttaatcatatcactactctatagctctcagaaaaaaaaaaacaaaaataccaaccttcatgttaatactggttactattgagcagaaggtcagcaaactatgtctatgaccagcagtctccagttttgtaaataaagttttattgaaatacaaccatgcctatttatttatatattgtttatggctgcttttgctagctgcttttgcacttgaatggtagagtacattcagtcagtcttcactatctgtgcattaaatacctgcgaattcaaccaacagtggatcaaaaatatttgaaaaaaataaaaaattacaatacagcaataaaaataatacaaataaaaacaatataatatagcaactacatacatagtatttacattgtattaggtattatacataattagagatgatttgaagtgtagaggaggatgtgcatttgttatatgcaggtactatgccattttatatcagggacttgagcatacatggattttggtatctgtcggggatcctggaacaaatcccctgaagattctgagagatgactgtagctataacagagacccacaaagcccaaaatatttattatttgggtctttacagaaaatgattttcagtcactgtcctagagtgatagactcatgagtgacatttattcatatttagtgtttcccaatttctcaatttttctttaatgaccctttgttacacatccaccctccccatattagctgtgtgacttcagataaattagttagcatatatttgattcattttcctaattgtaaaatggagaacataataatgattactcaaataaactgttgagaaaagtaacttaaataatacaaataaagttcttgcaagtgcttggggcatgcctaatgctcaacaaattgaagcactacattaatcatatgagttattattgcatattagaaaataaaattatttagactaatactctaagtccttggtactcaaagtttgatttgtgaaccagcagcattggcttcacttaggagcttcttttaaatccagtcagtcaagcctcagcccaggcctactgcgtcagaagctcttttcagaaggtccctcctacatactatggtgtggggagtgggagtctaagggccaaactgttcaagatataagctccacagtctggtacaagtgcaagccaatcccatttccataggatggttgtgtctagtgtcctctctaatttctggagagcaatattgaactgatatttggcctctctggggctgaaatagatggcatcctcccaattaattaaacaaatatactcaattgtccacgtatatgtacttttattttcatttataaaatttgttataaaatcagcacaaattttcagtattttatatagtgagaaatacaggtgttttataaccttgagttttagatccacattcaacccacaggaagagtaatttttgctttgagtacaaaatacatatcactgtatcctcatatccacatatcacatatcctcatatcactagggctactgaaaaacgaaataggaggcaacagggaaggggagagaaattgaagttaattgccactgtcaccactcacccacacctcacccttcataggaagagttctcctctaaccatcaccatattgccagatctcctgggcactggagtatttagagggccagccatttcagatctgacaacgctgcactctacagaaagggttgtcagggaatcactgtgacccactacttctttccctgacacctgctcagaccaagctacccttgccacacactaaacattctaggcacaggcatcctcactttcctgcttcttcttgggaacacagcctggcagaccagagcatgtcagcaccaggagcatgtagggattcaccttggggtttgctccagtcatttcactttgtatatcaggtgaagaaattctttatcacttcatctttacatatcaggtgttcatgagaattaattttctttgcttacagttattctcagggcgttaaagttggcacaaatttaaaatacccagggcaaaagataaggatgcttttataccttgtaaaatatccagccaagactaaaaatgaagtcaaatactggtgtcagctgaaacctaagtcggcattggatgtgtgttgacaatcgcacctgctcagggtccattaggtgttgtggcttacaatgatgctcatccttccacttcaaccttgaaagtaaatttcacaaacatgaagatgaggtcatttactgctgtgattattgagcccactgggcatcaagcacacacttccctgccttctccttgggacacagcaggatgtcgttgctggaagcatcatcttttcctctctctggactcttacgggttccccatcattttgactcttgaggagagagcaagtaaattatttaatggtgcatctttatacctcaggtcttcatatggatttctcttctttgcttacagcttgttttggatacaagaaattggagcaacctgaaatattaatttccagagaaaaatattaaaagtccaaatactatctggggtggtatctagccgcttatactggctgagacataacttgatgcattttcctcaacaacatgaccctctcaattcacttaggggctgtagctgaaaatgatgttcctagatctgttttgacctacaagataaattctcaggaaaaaggaaatggagatagttatgtgcttgctggaatcacagatgagagatgtcaggacacccgcacagaatccctctttaggtctgtgtgtaccagcccccttccaacaggagcataggcttagcagggttgtcagggttggactgcacctcccaggacttccccttcaacctctggaaacttgattatgttcacacattaggacatacagaaatcagtgtactctgtgctcaaggtccagggattacctgaaagtttatatgatccagactcaaagagggaatcactgagtggcaggaaacgtgctgggtatcttacacatcttatataaccattgcaatactttcgcaatgtcatcttcatttttttccactttaatatgaaataatttgaaagataaaataccttcttaaaccccaaatgcccatgtttcctcagctgtgtcctgtgaccttgaagaagttagcattcatttgctccactcatgttgggggtgagtgtgaaatgaagctcctgccctctcctcaggctcattccactctgagggatcctcctacagtccagccagcacacttcctttgcacaggtctcagatcctcctagggaagggagggggcattagatgatccaccgacaaggtggatccccaccaggatggatcctcttcccggcttctgcctgtgattgcagcagccgtttattcagggtactctgctccctcttgggcactgctctaaatcctttacatgtaactcatctcatccttgggacatcttttcacattggtctgttgtgattctcatcttacgggggaggaaacagaggcagagcgatgtgatttactttgtggtcagagttcttaactggggggggggaggggctggggttctggcttcagcgtctgtcctcgtaaccacgctgtgtcctgactctgagagaggaggtaaaaatagcatctaatatgtggtctctacggctagaaagaaaactgataggaaattaaactagacattttagtgaaattataaaggctgaatgcagactagtgggagagtgtgagccgctgggggccaaaattttagggaatttcccaccatcttttagactttttctccaggaaccctatgcaggctcttgcagggaagagcatggagaatccagagaaagctcccctttttggtactggcttagaaggggaacagtagccactgtctaaattcacccagacctaccccacctcttctccactgtagaaggacttaatctgcaagagaaggtttctatggaatttcattttagttgagggagggaaaaggaagccaccatcaactctgcccaatactttatccctatctccacagagtaatgagttttaatgtgcagaagggtgggtgtcaaaatcatagcccaaggacactggtgggtgcctcctatgactggaaatgtgccacctctggaataagagcagcaacagttgtgaagttacattctcaagtcccggtttgaccctgcctgtttaagacagaagctgaatgaaaatagcagagaatggctcccttcctcacctcaccaccatactaccttgagcaaaagcaacagtagaatgcagtgaagagagcttcaaaagacagactgtctctggggagcagaacaaagggatggctcaaagccaagaacaagggatgattagagaaatctaaagtctctaatgtcctatgaagaacaaactccaatccagacaacttagtagcaacaacaaacttctaacccagtctaactcctaactagattaacacaaactcccacactaaaggtctggcagaaagaaagatgcaggcattttttttttcttttttcttttttctttttttttttttttttgaggcggagtcttgctctgtcacccaggctagagtgcagtggctgatctcagctcactgcaacctctacctcccgggttcgagtgatttacctgcctcagcctcccgagtagctgggactataggcatgcgtcaccatgcctggctaatctttctatttttagtagagacggggtttttaccatattggccaggatggtctcaatctcttgacctcgtgatctgcccaccttggcctcccaaagtgctgggattacaggcatgaaccagcgtgcctggccaatgtaggcatttttaagcatcaaatatagttatctcagtatctactgtgttatacaacatcgtcccctttcaataaaaaaatctaagtaccttaccccaaaacaagaaggaacacagtcttgaagccacaaagcaatcatacgcatcggactctgatatgactcagatgtttgagctgtcaggcagggagtttaaaataactgatgagtatgttaaaggctctaatggaaaaggtagacaacatgcaaggtcagacagagaatttcagcaaagagacagcaattacataaaaaaattcaaatgaaaatgcaagacataaaaaaaaaacacagtaacagaaatcaagaatgcctttgaagggctcaccagtagaccctatggagataaggaaagatttggttaacataaagataggccactagatatgacccaaactgcaatgcaaggagatgagaaagaaagaacaggagagaaagcatatcttcatggaagaacagaactgtggacaatatcatattttcaaacatatttgtaactagaatccctgaaacaaaagagacaaagagcagaacaaatatttgaaaaaataatggctgagagtattccaaatgtagtgatagataccaaaccacagaacaaaaaagctaggaaaacaccaaccaggataaatattaaaaacagaacaaaatacctagacatattagatttaaactgttgaaaaccaaaaataaagagaaactcttgaaggtagctagagggaaaaaagcagattttccatctgaaaccacgcaagcaagaagacattggagtgaaatctacaaagtgttaaatgaaaaaactgtcacttggcataaagacagcttcagacaaaataaaaactgagagaattcattgccagcagttgcacttcacaagaaatgtctgaagttattcaggcaaaaaaaaaaaaaatgatatgggtcaaaaacttgaattcacacaaggaaatgataagaactggaaataaaataaatgaaggtaaaacatagtcctttaaaccttaattgctctaaaacaggagttggcaaactatttttgcaaaggacccaatagtaaatatattctacgttggtggacaacatagtctctgttgtaactacacaaatgggctattgcaacacaaaagtccttgctactcttaagtctggagggacatggaactgttataacaaccgggagggtatctgtattgaaagggacacagccaaccggtcttagtttgagttcccccaggaagtgagcctcaggctttgaggacagctagtttgtttgggagacacaggaagactagtaggagagtgaggagatgatgttaagaaaaggaaggcagataattaaattactttcattaattagatactaaatgagcaacaggaacctcatagaagttcaaaacctaacagatcaattaaatcataatttcttgtttttctgttcctttaattcgtgggactggccatgtaaaataaataaaatctgcagacccctatgtgatctgatggttagtgtggtagtgaaccagggaatcttgctaagtgtcagaacgtgataagaaagtaaccacagagcagaaaaatattcctggtgttaccttaagttataaagacagagcttaaaatcgagcacacatattatatctatgtgaagcaaatgaaaaagatgagcagatattagcctgtaagggaatacaccaaactgttaatagtagttgtctctggttggtggggacaaaaagtgactgttttctctgcatttctttctgacccatctacccatgttgtcttcccatagctatttactgccctttgtttctacagcttcctaactgttctgaaatcccttactaatcagagcagtttccctggtatgcccatcacacatatgggcatgtgggacatagagattagctttttttctgactagattagtaaattcttataatagaaggacctgctgaaccaaggctggaatttcctactcttcactctgaaagctggaaccaatcccaaggggctggccacacacttggttcaaattgggtagtcctggcctgctttctgccttcttagagtgacctaggacttgttcatgtccaaggccttaccagccacacctagaaaatagcaagaacaatagtagcaaccatatctataccattacatttagctcagtacctctctttttggatgtctgacaagtagccaaaaaaattattgattccaattccactcccttcccccaatctccaagcatgtattattttcctccccagactttcctattgcagtaaatggcaacagtatattgtatcatctgatggaatggcaagggtgttttctcaagcagatagtgttttgttgacttctgtgttttttgtttctcctagtaatgagagaagagtgcagagacccaactattactgagtttcctgtgatatgagatctgaagggagtttacaggagctcttgaagctatggtttcacctgcgagaaagacacccacaaaccaggcccaaccctgtgtggtccaatctgagactggagtaggctgtctcaacagagcccctgaccgaaacactacagacccaatgcagggaagacccagtcttctctctaacttactgcaggtttagaaactctttgtgttccccctgacatgtgcagggcaataggccagccatgacggcaatgattgtcattctgaagtgcatggcccaaatggccccatggatgtataatctcctggtgtcactgaaagacaaataaaaagaaagtaaattgtgagatataatttgatattcagattcaactagccccgctcctcacagattattttgctaggtgttgtcactgactactcaatgctttttagaatatgcaaatcaaccatttcatctgctttttatttcgtttaatatgttctgtgattcctagaaagcaatacccagcatcctctatatggccatttgagatacagattctctatattatacagacctagactatacttgggaactgcgttccttccacacatatctctccaactgtgaagtaattgatgaacagggtttgggatctggaaaacttgaactgaaatcctggctcagtttgaactccctaattctgtttcctcacatgacttttaatggtaataaccatttatagggtaaagcagaaagagataaatgcatagttagtgcctgactcatggtagacactatatttatgagttttcttctctttcactatcagaaagcacaggcccatggattgtcatcctgcagcagggggaaggtaagtgaaaaggagatttggggcttagagtagcatatcaatttctcaagacatttttccagacacgagtcttttatgcaaacatttcttgtttgccaaaaagaaacaagtgtttcaccaggcatgtttgcctgtgggagcagtatcagttgaaaagtatctataaatctacaatatgcatagtggcatgttaagtaccccaagtgcaaaagaaaccctaaaagactaaatcttcaggttaagaatgaagacaggtggcacaattgctaaaagggagaatctgattgaaagtgcagtgacccggcctctcccaaacactgccctggtgtttttagaaacaagtgaagatccactggactatattgtaacatatctgatattatctaagtgatgacatatgtgaaatcaaattatgctaatttatgaaagttagtggtccacagattgtcagtatgtgatttttttatctcttgtacatgtcagataatgtgtttttttttgcttcagagggtggtctctctcagaagtgtcttaacttactgctgtacctgatttaattaagatccactacaatttctgaaagataaaccaatgtgaaaaaaatgtgcaaattattattttggttcatgttggcaaccaaaccctgaaatgaaatgtgagatatattttcgtatcttttgatggtctaacaaatttggttgaagctgttctctatgaaaattattatcatcagacttgaaaaagtgatgcaaaacttcaagcaatgcagtatcaacttgtgctttacctcacttgacttacttgttatttatatatttgttcattcataacccatcttcttggaagcaggatttaagttgcctcagtttgttaactcaagacatgacaaatgtggcggggaggatgtatgtgttccaaaacacagggttagaggcgaaactgcttatctttatacacattcatttgggtttcattttacgcctttagtaaaactgaacatcatggtcttcacatagttctttttttttgtaaacttaataaaatatgttataattcattacttactttttacattgtattacttaaatctttcatggctgttgaaatgtagacagcttctaagacttctgatacttccccacatggttctggaataaggaaaagcagaggacaaagagggattgaatgggcatcatcccatctatgacaggtgcaaagggtaattgacagtacgaagtaacaataacttattattttcagataaaaagacacagaaataagatctttccattctaccttatgaagtgaagtctctctgtctgaattattacataaatgataagagaaaattaaacagtttttagcccctactgtgtcccatgctcgattataaatatcgtacaaaagtcctgggaaataggtctaattctctccatttaaaagatgaggaaacccaggctctgagaagtgtgtgtgcccaagggcacatcaccaggagtggaagaactggaatctgaacctgggttttccaattttaaagtgtctttttcttcattcccaacttcctgagataataatttatttcataagaatcctttaaaagctcgagtaaacttgttaatgtttattgctgcagccactctgtccatctccaccatcactgcaacaattcaggtcctggttgcctcttattggattatggcgaccacctataaaaccatctgcttcagccaaattgctgtcctggggagcgccccttcctttctgcttgcacatctatctttctccagtgcaaatgtgatcatgtcactttcctctctaaattttttagcaagtcctcattgtctattctttcaaaaacatttatttgaaaatactataaaaatagaaaattttccacatgcttacttcctaaaaattaatgtgttaagtttctcctaccccatttccatcccatgcccctttactcaatggatacaataaatctccaatatgttccttctggccacgtgttgctttgtaattttaattttaatctatttggaccctgtgttatctgggatgaggtagagtggtatttttattttctaaggtaattattttcctaatgcccgtttccaaacaatccatcatttcctttcaatttaaaaatgctgcagcgtgttttaaatatgcacacatatttgacacattttctggagaatttctgttttatttgtctgtttcattattcttacatcattatcatattatctcagtagctttgtgataaaaattaagatctactatgccaaatgtctattcactgtaccatttttcagaaaatctttttcaatcatctcatatttattcactcctgtagaatttaaaatcaacttatctagcccaacattaaacctcacagcctagaacaacaacaacatgtcgtagtaattctgactggaattgctggaaatttatagatgaatttaggatgtattggcctctttatgataggagctttttattcatcaatgtatgtttctccatttatttaggttttattttatgcccttaggaaaactaaacactgtgttcttcatatcattcttgtatttttttggtaaatttaataaaagattttataattcattacttttccacattttattagttaaatccttcatggctcttgaaatattgacagctgctaagacttctgatgcttcgcctcatggtcctgaaataaggaaggccagaggacaagaagagattgagcgggcgtcattccatctatcacaggtgtaaagggtcattgacagcgccacataataattttgaattttctattaagaagaaaccctttccaaacataattttcacccagccccattgtcctctccattgaattgggggctgtgagctgctgtgtatggacaggtaccctctgtgacctcattcatatcttcctgaatgaggactcaggggacttaggctggagcagggtggatctggagtggacatggaggttgtcaaggcttgtcctcctcagcccttgcaagtgaacacctcatctgtactcaggagatcacacagctgaccccggcttaagatggcagatttttcaacatattagataactggatttgttttttttggtcatgcctcagtataattaaagaatgtattatttcatgggagatagaattctacaaatttcttctattattccaggagaaataataagtcattgcagaacacattttttcatttggcattgccttggtaaagcatcatgttgccaaatgataaaagtggctttttgaaagtggagaccgttgttcaaatttctcaagtatatctgcattgacacatttgcattttcagttactaaagagcttcctcctttcagaagtatcttcccaaattgctagcagagaggctctggtgtttgtgggaacagaagggcttttcctttgatgtaatctcaaagcagtttcaacacaattgaacccctggaaaaaaaaaagacaattctctgaatacttttcctggtaatttagaaaagcagtgggttgacccattaaacctgctgttttctcttcctgcttttttttttccatttcccttttctgttggtgcttttcaagaattactgccttagaagaaaacaggcaatttatgaggaaaaattacaaactatcacatgtcacaaaacctatattcaaggacttccaaaaaagccagaagatgaaattgctagttcaaagttgttggattgctagtcgtgtcccgaggatcagaaggctgagatttttgtagaagcttagaccggtgtgataccactggttggttcaagatatttgctgaagggactaagctcatagtaacttcacctggtaagtaacttttctttctgtttttattccagtaatgaaaaactgatagatgatttttagaaaaaaatgatcaaccttatctgaatatgtcacattcctggcctcagtatacgaacagcaattttgcagattagctgaatatggaaacaaaacgattttgtacatgatatcttcccttccctgtctgtaagcggattaaaattctactttaagaatacacacacacacacacacacacacacacacacaaaagatagactctggcaagaaattaaaatgttttgaggcccatgtctatacaccattagtgtaagtccttggtccaagttacttttttgttggtcttttaagtgagagacataaaaatggagttttattaattacttcttctctgtattttgagatataacatagtgctcccttcttctgctagcctgccaaacccatgttattgattttgatctcatcctgagaaatagtatagaaaaaaattacttcttatagtaaattactatagaaggtcaatacatcccacttattagtgttctagtttctttgagggaggctgaagtcagtcaaaatttatgcaattgggactcttgttatatcacctggaaatggcccggtttaatagaatttgtaagttcaaccagccatgtcagctccaaggtcaatgaaaagagtcttcatcattttacatcttcatttgttcattcatcctctcagcaaatatttatcaaaaacagtttttgttctggatgctagagataaaagggcaaagaagacacagtctcaacactcaaaagctgccagtctggcagataagtattctagattctggcttggttgggccctgtccacgttctttggcctgtggctgccggagaagcagaaggtcttgggttcatgagctcattttctttcttaatttgtgtagcagttattgcttataagatctatgtattgcgtttggtgggaggatttgataaaatgacccaatattgtccttttaaggagaaaattaatattagcaaagtttattgagagccagacaccatgctaaatagtttcaatgctttatctccttcctcatcagacctatgcaggagatcctcttagtcccatttcacagatgaggaaactgaggcctagagaagctcagttactttcttaaagtcacatgactagtcactgtggaaaagtctgggatctatctaagcttgtctactccaaagtgcctggtctggacccttatgtgatatttagaaatattaagtcatatttttatactttgaatatttcttcttctgtagcttgaccctatgaatggactctttagttgactatttttctagtaacaactcccaatttgtattactatttgtgtattaatacaattcttctacttctaattatggcactgaaatgacctctctcctccaaaaagtcatatgggatatacatttattaaatactcaaaatataatttttagggtatttctgtagaatgagtcattttgacgtcattccactcagctgtctttctgtattggcatcaaatttgctagatatgttgaaactgatgtaggagctatcgcagctatgctatattgcagtgctaagtcgcataactcagagctgcctcagattctctgttgagtagcacacgatttaatttgatgaaactgtatagatattttcaagtcaaaagtagcagtctttcagcaatgaatcatcattaagaattcatattttctaacaactcatcagtattctatcagtgagaactggattctaaaaagaacttactttatttttattttttattttttgagatggagtctcactctgtcgcccagctggaatgcagtggcatcatctctgctcactgcaacctccgcttcccagtttcaagagattcttctgcttcggcctcctgagtagctaggattacaggctcctgccactacgcccaactaatgttttgggttttttttgtatttttagtagagatggggtttcaccatgttgaccaggctggttttcaactcctgagctcaagtgatccgcttgcctcagcctcccaaagtgctaggattacagggatgagccactgtgcctggccaaaaagaagttattttagaatcaatctagatacccatccctccatacatatgaatcccaaaatacctataaatcatattgaatatctatttattaaatgtcaaacataggaatcctattattgtctctctttgaaaattaaggaaatattaactctaaattacacttaagacaaagtgtatacaagaaaactttttagggaagatttagaagattcaggcaaaatcatgagaaaaggtaaaatcagactctctaatgtatgggatacaaggagagaatgtacatagcccaaagtgcccagggcaaggtgaggtcagttcttaaattcctgattacattcagatccagtgtgattttgtttgacctttgtcttgacttaacgtcagcagggccaatttttatgtatttatgtaaatattgaaaaaaatgttggcacaattttaagacaaacacaaagggagattcttataaaggcttctcaggtggtgggcaagagttgggcaaaaaaatcaaggtatttggtcccggaacaaagcttatcattacaggtaagttttctttaaattttgcaatgtaaagaagggatgggaggctggcaggcaggagctggctcagaattctaggattccctccttggtcactaatcatggtgaaatctccagagaggtcaggtgacttggttcatgccttaggagtcagaacttttcctgccctagcatgggagacattactaaggagcttagaccaactgcaaatctctaaaggatggaggccttatgttgttccattggtatctctctgttgaaagttttgtgaacaagtttagttttgagattttatttcttcagttctaaaaataaccaatggaaaaaattaaaaaaaaaaaaagtaaaatcagctaccctccttatttggtcaccaaaagatgaaatatttgataatttgaccaaagaatggttaatatcaaatgttaaaatatttctcggtgtgaccatatttagaagtaacataagctgcatttattgttatttaaattggtccaatgagtttgtttattatttgttagcttaagtttaaagatgtaattttgcctggatgagagaaaacatctcataaagatactcttagtctgttagatccactgaaatgaaagttttcagagaattttcacaaagttgataaagcatcggaaaaaatgaaagcagttttacatttttaattccttagtggttgagatcttatgataaaatgaacttataagttaaaaagtgaccttccgattctcttttatccaattgacttaatgagaattgtagcaatcaaattcataatttgtaattttctgagaagtgatttttcaggaaagtgcggtgcaagaaaaggtatggactttgtttctcgactcctggagctagcactttctatgtaactcccttttaggaagtgtattttgatttaccagttgttcaaattataaaaatgctggttcattatagaaaaattggaaaacacaaaaataaacaaaaaattataatttgatattgaccctcatcacattatcattttgttatatttttatttaaacatttttctctgctttttgtttgtttgttttacaaagttggaatcatactagatacacaataatagatctggctttttcacttcacactgcttcataaacattcttttcaaatgtccttaatatttttcaataccagaacaaagttgaaacttctgttttcacgttgatctgtacaaagaagataatggagattatttatctaaagtggatgttataaagattaaatgaaattaaatatggaaattacctaccagaatgcctggcacttggtaggtgatagaaatattatttcctcttctagaattcaagttactacccacgaaaggtctttatacactcaggaatacagataaatgtatcgactcccatctattcagcagctcacttcagaacaaatatcactatttgtaaaatgctttctatgtctaaaagactaattgtacctgcttctaaaagtaattagaatgttttacgtattatctcaaatatgatctacctgaatacaaggtgatttttcattttcaagagaaaatttatgtttaagaaaatatgtattttcccctcccccaactcgaatatgtaaatttatagggctacaggtaaaacagtcaaatgtctacctataacatttaatttcttacctggttcatactttcaaagttaaaaattatatcaatatcaatatcagttgagaaatattgccttttttgcccttatatttcattaaaacttttgttttgatgcttcacatgcatgtaaagcatctatctcagaacagctttctaaggcatctcaggtcaaagcgtccactttggaatcctcttatgatggtgtctctgaatattttattctaagacacaattattcactcacaaaataaaaggatatatttttttccaatttattctgttattctacagttgtatgaagtaaaaactacagagacattaccccaagtaataatgaccaaatccgtgataaatttctttgcctttttttttccttttaccagtgctattccccaaactagcatcattgagttcatttcatgtcgatatctcctccagttagtccttctggatcaaagcagagtattagaagaacattttttaatatgagaagttacacaaagactgtaccatacataaggcacctccccatgttgtgagagaaaattttggggaaaaaaagcttcattttaagttctggcactttctatctaaatttagtatgtaggtgtccctatcacagagctaggatttgcaaacatagtctccattccttgtgtcttatttgagcttgaccttacaaaaccatcaactcctgggggcaaaggagaaacatgctaaatgcacaaactctttgttatttatttaagctatctctttccaaaatctatttgagaagacctaaattaaaatatacaagcacagtcagaccattaaatatatacagatgatctaaagccctaaggaaaggagaaggaaaaaggcctgtgattacctagtgaggagcacagtttaaaattttatgctcaaaagaaggagaaaaaggtaggggaatacatacatcttactaattgataaaaagaagcacaccaaattttcaaatatcatatttttttctattactagattggaaaaagacttcaatgcatgagtcctttagaaggaaatggaagagtgggcagtgccttcaacttccattttggaaaatgaaaggaatggtcatgaaaaacccactgcatattaccactgcatcagtgctatgggcatcctgacatttaatgaaatgcgcagatggtgatgctcagcagacatggtcaggcagataacatgtagtgatctaaagtgacaacagagagatggatttgaggaccaggcctcttgccttttctctacccattctgccttgaagggtaaagccaggtgtttcaagctggactttggcatgaactagacagaagtcagtttcaggctgaagtttctggtgaaacttggaaggcaaataagttgtgctgctgattagaaaaaggctcacttgttttgaaaaacacaagtgaagaattcccatacactgactgcatatattagactttagccaatgttccctttgactttcttaacacggtaggtaaggcaaaggataacctattaaagattgggcgtgtgaaagccatgtttcttgtgatgatggggacgatggctttgagaatcccagagcaaagtggaatgcaaacagaggaactgagaaattattcctcctgcttaattgctatggatttaactgccactccaaaatgctgaattttttttagtaagggcaatgcttggtcctatagggttaaaatgtcatgtcaaggcacacaatcatagcaaacagattgctaatcataacaatgacatcatcatcatcataatctcttatatttccatagcatttatttttgaggcagggtcttcccctgttgcccaggcaggagtgcagtggtgtgatcaattctcactgcagcctcgaactcctaggctcaagtgaccctcctgcctcagcttctcgagtagctgggcctacagtcgtgcacatcatgctcagctaatgctttttgtatttttagtgaatatggggtctcactgtgttgcccaggctggcctcaaaattctgagctcaagcaatcctcccacctcagcctcccaaagtgctggaattataggcacaaaccactgcactgggacctataacattttaatcaaattgcttttttatatcttgtttcattttggtctcacttcagtgctggtagcgatgttgaactgattttgaaacatcactgtttttagacaaataaaacaccaaaagctttaagttatttgatttgtggagcaacagaacttgttatgagcaaaatgaaccaggactggaaccctggtcttttgagaatcccagaccaccagaatttgaagaactcagggaaactgaattagagtttttgatatggactgaatcactgtggaattattataagaaactctttggcagtggaacaacacttgttgtcacaggtaagtatcggaagaatacaacatttccaaggtaatagagggaaagcaggaaattattaaactggaataatgtaataatgtttagaaaaaagaggaattggatggggatttgatgtagaaaacttaggagagactttaaaacaaacgctcatactaaaagagaacatagataacattgcacagatatcataataagatttggctttgtgcatatacggacttccataaagggctcatatgtaatgtatgaaatgatctcattaaaatgtctggccctgagaccaaatgtattatgacaggtaagtttgtgatagactctacagagtggacacatattcatctctgatggtcaaagacatgtttactcttgttgtgaaggagcccgggtgttggagtcaggtccacctggaactctggctccaccactcactgcttagtgaaattgagtgattattctctggcctcagttttctaatccataaaatgggataacagtatgaattcagcagggttgtataagaattgcacaacatagtgtgaattaagtacttggcacattgtccaacccaaaataggtgcccaacaaatgttttctggattcacatgtaaagagacaatgggatctactatggagagttgctctcagtccatctaatttacagagcagcaattctccagaggattcagctgtacttctaactgctcaaatggaaggttatcaacatcagctcacacacgcaaaaattgaacttatggattcgtttcttgttagcaggctttttaatcacgtggcaaaaacattgtattaagatgtctgttttttatttttgttgttctatgtgctttacttaatcctttatcttaattgatatcatttctaacaccaacatattggtcctaagatttatagccaattagtttagggttctgttcatatgtctcaggaaaaaaaggttaaaatcttaccaaaaatggtcaagatatcaaatcaattaaatccagttggaaacatcataaatctgaaatacatatttaaacataaaatggctataactatttagctaatgaaaaaataagaaatagagaacacttaaataaatatccatatgtagatttaatatatcataccgtctctaaaaactgtagttgatatttggtaaatttacaatgctgcattttaataaactacaaacaacttaggcaatttaactcaaatatactatttgattttgcaaataaatgtacataaatgaatccaacaataaaataaattttatttattattttaaataaaatatgtaaattctatttgttattgaagtaagtaaaaatgtaccatacttggccataaaaaactcttaatatgtacattttaaaagtagtattttaaaaatcatgtgagaggatgatccacaatatcggcccttaccatgtgtaatcaagtatgctatttaatgattcgttaactactacgttgagaaagttttggaagttccagattcattttgtcctgaaaagaatgaaacttaaagaatctagctaaagaaaggggacaagaggcaatgaatgctgtggtaccgtacagaaaatgtccaagtttatcatttgatttttaatttctttagtacaatgaattagaagtatttcaatgaagagacactagttcttaggatgaaaattagattggaaaatatattgactagagactacaattatataaatataatgtacaattgaaaaattactcatattttataacatgcttttaaaattagaagcaaactatatggtggagaaatatacactgtctcacaagtataacaagtaaaatactatttgcactaaaagcaaagagtatgaaattaagatgagcacattatgcctaattaaatttatagcatgctcacaaattaatatttctgtatatgtttactaattttgtatgaaaatcagaagctttgctacacagacagaaattatcaagactgttttcttttcttctgaaatgagaaatttaattcttattttcttagaaattgttcaattattaaattcacttcaaaccagccaaagcattggagtttcaattggaaatcaaaatagaaagaattgtaacatttataatttcagttattagattaaaaatacgtgtataacccattaacattccagattcaagtgatatgcctttgtaaacatatgatgctttgttatgtatcttgaccctatccctataagaagctctgaaatcatgacttttaatagagcaattatatgtacattttattcagcaggctaagatgaagagaataatggagctttaaaacagttaagcagcatataggacagatacaaattctgggagagacataaagagtcaaaatatagatacactgatttacacagaccttctcattaatggggtaaatttatataaaacccagtataaaaaatacacccctggtgcattcttagtcattcttaaacttcaaatgaaattccaaaataaaatgtgcttttggtgaatattttctgaagcaaaatgaaattttgataagtgcgttactgcagaagattaacacaagagtatttctgaaaataatcaagaaaaaatttaaataagagttttggaaagttgccattttgtttctaaattcaggagatggtgaataatctggaggtacagctgtaaatactgctgcatcccaaaacttggagggtgcagatgtgaaattgagatgttatataaagttagatattaactagggggactgctcatggtatacacattgaagctacatggtcaacttgatagacagtatgtacatgcggaagtagattctctttaaaacaagtgactgtgtatgttaaaaataaaagtgaacaaaatggctaggcatggtggctcacacctataatcccaggatttgggaggctgaggcaggcagatcacttgagcgcaggagttttaaaccagcctggtcaatatggtgaaacatgttcctagaaaaaaaatattagccaggcatggtgatgcatacctgtagtcccagctacttgggaggctgaggtgggaggatcacttgagcctgggaagtcgagactgcagtgagctatgatcttgccgctgcattccaacctggacgacagagcaagccccagtctcaacaacaacaaaaattttgacattgattcatatgggaaataagataaataataagataaatatggtgcatcgcagaatcagttaaatgaagagtgggagtacacgaaattgcagaacatgagaatgtgtcatatttggccaaagaacataagttacaaaggatggaaaagggaagtgggaaaaggaccaaagagtctcatctgtagagagatcattaaggttttctgaccttccactttcccctgccatccaccttgaaaacctgcttcactatgatgaaacaaaagagattaaaaaataaaataaatatgctcatgaactttggaagccctggtaggaggcagttaaaaatcacactcatcacagcatgtgcagaataaacaaaggccaggttttcgtccagcatctgacatttgagagctgtgacttttggcaagttatttaatgtcttgattctcttttcaacatctgtaaaataagcacaataataagtactgtgcagcctatcctggatgaaaggccgcagtggacaccagctcaatggcatcttctctttttatggttatgtactaggccactccaaactgtgcaatgtgtgtgtttctctaatgattcttttaaactcatatttcatttctccccatagataaacaacttgatgcagatgtttcccccaagcccactatttttcttccttcaattgctgaaacaaagctccagaaggctggaacatacctttgtcttcttgagaaatttttccctgatgttattaagatacattggcaagaaaagaagagcaacacgattctgggatcccaggaggggaacaccatgaagactaacgacacatacatgaaatttagctggttaacggtgccagaaaagtcactggacaaagaacacagatgtatcgtcagacatgagaataataaaaacggagttgatcaagaaattatctttcctccaataaagacaggtatgtgtttacgcatatcatctgtcagaacacttctttgaaagtgaatgctgcattttttcctttcagtattaatgaaaaacaaacataaatctttcttaaatattgttacatttaatggtagcataaatgccctgctacttttctatagaattaaaatggtataggttttggagaaaacaaaattgaaaaagttactgaaggtttgtcagcctcagctccattatccaaaataagaaagtcacgtgctggtttttagggttgttagatggattaaagaaacaacatacacagaagcatctagcaacgtgacacgtggtaaacgctcaaaaagtgttctcccttcttttgatgactttacttgatcaggaaataacatatatatgtctttcaggaatgttctgcccaagcaggagagtcactcacctcaatcttgctacccacaaagtttaacctaaaaacaacgggttcattgttgacaaaatgatgtttatctgttgttgacagaatgatgtttatctaaaaacagttccaattttctatttcctttgctgagacacaaaggggaggcaaatgtgcaaagcttgagggtagtcttaccactgtgcttaagtgttctgatttttctagtgatcagggcaaaataaaaagtatagtaagttccaaggcagtgaatattatacaggagagaagttacagttttataatgtgttttcctttacactaaattctaaaagtaaaaagtctttttttttttttgacagagtttcactcttgttgcccaagcaggtgtgctatggtatgatctcagctcactgcaacctccacctcccgggttcaagtgattctcttacttcagcctcccgacaggctgggattgcaggcgcctgccaccacacctggctaatttttgtgtttttagtagagatggggtttcaccatgttggccaggctggtctcaaattcctgacctcaagtgatccatccacctcggcctccaagtgctgggattatgggcgtcagccactgtgcccagcctaaaagtaaaatgtctttcatgagcttcccaaggcagctacgttaaggaggacacttctcttaatgtcattctacagtagatttctaatgctctttcttggaagtttgtttttctgagaaaagctaaaaatataacatggaagtgatcatattatataatcaatgaagtgcttttcaaggagataaaactaatctggtccacacttgcaaccaaccttgattgagagagagagagaactcaggatacacttgaagattttattatggggaacagttactttattctttttacctcaatcaatgcatggaaataagtgatagtcattttcatttatcttttaataaatgaagtcaccatgaggaaaataaaaagacattgaaaacccattaaagtcagcccttaaagatatttggacatgcagacttgataactaacgtttgcattcttgagacttacccaaaacccatacctcaagtccaagtttttagaattcatgaaataaagatctcagtgagtgcataaaattgcgcaccagaatcatatccgtatagacaagaacacatctactagaaaaataataaaccaacacaccaatgcaactgtgttttcttctgttttaaagtatgttgtctttgtatgcatgtttgcttcttcctttttttttttaacatcacagataaattcaactctcacctcaggttttattgagagaactgtcaatgtgacttggcctctgtctttctagtcccagaaagaattgcactgaaatctgagctcctgtaataaaaacaaccatttgctgagagtaattaacatactgaaagagattttcttagagtacacaatggtgacattatattgcctctttataaataactttctatctatttctgtggattattcctacaaagtacttttcatatgtccaatttcttttcttcccctacaactactgtctgaatactggctctgctatttgctgatatgattctcggcaagttgcctgcactttttaaactttatttcctcattcagaacatggggccatacataatacaactcacttcagtgttattggggaattaaacaaaaaatgcatgggaagcatttaacatagtgcctgacacaataatgagtactcagtagatgttagcttttattaatattgttgttgttatgtccagaaacactatacctccagaaaatcatgggtacttgctggggacattggggatatgcatgatttggaaaagaatgactgctttttttgcttagatgagaaatttttctaagccagactccttcaaatatgtaagattctgttgtggattcaaggactgaaagaattcttggccgagtgtggtggcttatccctgtaatcccagcattttgtgaggacaaggcaggaagattgcttgagtccaggagtttgaaaccagcctgcgcaacatggcgaaaccctgtctctacaaaaaatacaaacattagctcggagtgagtgctgacatgtgcctgtactcccagctactcagaaggctgagatgggaggatctcatgagcctggggagtttgaggcttcagtgagccgtgatgacaccgtactatactccactccagcctgggtgacagtgagaccctgcctcaaaaaacaaacaaacaaacaaacaaaacaaaattaatctttttgctgatgtcatgtcagcagtgtgtgttgaaggctgtaaagcagccatttgttcagtttatttttccattgaacaagtatttatcaaaaacatactttgtggcagtcactatgctaggagctatgaatacagaaggaaaagtaaatgctcttggatactacactccagttgtgataaaaaagaaaaaatgtattcttcaccaacttcaacatcttgatgtgcaaaaacataatacatgaattagatctacctaattacacagaattagaccaattgtttctggaattgtgggctcatatttttaataactgtcctcctgcctctctgtcgacaggttttataaatattcatttaattacacacacacacacgaacaattgactagtacttgctctcattcttctagatgtcatcacaatggatcccaaagacaattgttcaaaagatgcaaatggtaagcttttgtgtttttcccttcctcctgatcattttgttttgaacttctctggcttgaaaaatcagggaatggattttgctaggttggatgctgcagaatggacctagtgatattttaaattagtccctcattttctaggagttgtattaacaaacctaactactgctttggggtatgagatgactgtaaattagagagggtacagtggtatagtgatatgcttttaattatttcaaaaaaaagattttattcattcatgtgtcttttttctttttcttttcttttttttttttttttggacagagtcttgctctgtcacccaggctggagtgcggtggcagtatctcagctcaccacaacctccgcctcccggcttcaagtgattctcctgcctcagcttctcgagtagctgggactacaggcgcgtgccaccatgcccggctaatttttgtatttttagtagagttggggtttcaccatgttggccaggatggcctcgaatttgtgacctcgtgatctgccccctcgccctcccgaactgttgggattacaggcgtgagtcactgtgcccggcctcctgtcctgtcttttgtttaatgactgggaaaaacatgataccatgttgcttctcgagttgttttgttttagtctttggtctttgctagtagctaataacacgaactagtgtttatcaagtgctttttacacagaagggcttgggctgtgttctgcattttcttgtttaaccctcttaaaactcctataaaatggtacatatttttctcccaatttacagtccctttaaagcaaataattataaaaatccctatacatgtcacacagctagatctgggatttcaaatcaggccatcaaacaaagagtttatgtacttagtaagttttctgttctttttctacaatagagtcagatagcaagaaattaccaagccaggaacctgaaacaaaacggacatcatgtggggctgggtgggtgcatgggctttgcagactggactttcactccagctcttttaatgattaggtgtaagtgacctacattttgtgagcaacagttttctcatcagccaacaaagaataattacaccagattcacagttattgaagagataaaggcatgaatgtgagatgtctggcatagggcatctcatttagcagacacagaatgagtacttgtttctggctttttctctctacatatgcacaaagaatgcgactagaagcatgggctctagccctgctcaactttcctctatttccaataccaaggggctctgacttaggctgccacaccaggcaaggagggcagtaccacctcacttgaccaagggcagggagtcacggacacatcacttcttgagatccttttccacaccaaggactgatgtttctggaattctcactttatgaagacaaaacatataaatggaaattttctcaggtagagactcactcttgtagctcattgagtaggcactagtggtccacccccactgtctttacttattccttgacatcacatatctcttgcaaaacctcaaataatattaaatgcaatcacccaataatagcatagccataattagaggcatttaggaaagacaggtgagtgtgccacaactacctaacacatcagcaaatctggattaaccactttctttgattttccacaatgcaaccttactttttaatagttgggaatgttctaagtgaatttagcagaggttgttaatcaacttgaaagctgaattctgacttgtctgactcttggtggtgctggtagcagtagatgtttacttttaggttttggtggtggtggaatatcacttcaacgtaaatcatcagaaataagtatttgtgaacccctctcgcattaatgtatcttattctgtaaaaagaacatgtgcaatttctcttagatacactactgctgcagctcacaaacacctctgcatattacatgtacctcctcctgctcctcaagagtgtggtctattttgccatcatcacctgctgtctgcttagaagaacggctttctgctgcaatggagagaaatcataacagacggtggcacaaggaggccatcttttcctcatcggttattgtccctagaagcgtcttctgaggatctagttgggctttctttctgggtttgggccatttcagttctcatgtgtgtactattctatcattattgtataacggttttcaaaccagtgggcacacagagaacctcactctgtaataacaatgaggaatagccacggcgatctccagcaccaatctctccatgttttccacagctcctccagccaacccaaatagcgcctgctatagtgtagacatcctgcggcttctagccttgtccctctcttagtgttctttaatcagataactgcctggaagcctttcattttacacgccctgaagcagtcttctttgctagttgaattatgtggtgtgtttttccgtaataagcaaaataaatttaaaaaaatgaaaagttgacttttgtccatggtattttaattggatgacatcaaattgaacatccaaggtaagaaacagcatggcaattgggctgtggaattctgtattggttgtaagaatggtccaacaccccatttctaattctttccctgagatcgtggttatcacaccttctaagaagaactacaaccaaatgaaggagctcatgtgacttctgtttgaaaggtcaccagagtcagattcattcggtttaggacattccagtggctataggacactatctactgtgacgcgtaccgtgtgagctcagctctagagtgtttcacagacactgtgtttcctgatcctcacgatacccccatgagagctgccctaaaagcagagaggcagcgtgatggagaggttcagcacatgctctctgatcccaggaatcctgggtatggtgtttcgtatctgtgtgacctcaggtgagttccaggaactctatgtgccataatctcctcatgtaaaatgaagttataatgccccgtttcctggagttatgtggattagatgagttaatgacacctggcacatgcaagtcctccacagtgtcggcacgcactgttggtagctctactctagagacagtaataaaccaaaaagtatctgacacaggcctcaatcaacttagaagtttattttgcctatgttaagggcatgcccaacttcctgagataataatttatttcataagaatattttaaaaactcgagtaaacttgttaatgtttattgctgcagccactctgtccatctccaccatcactgcaacaacgcaggtccttgttgcctcttattggcttatggtgaccacctataaaaccatctgcttcacccaaattgctgtcctggggagtgccccttcctttctgcttgcacatttatcttcctcaagtgcaaatgtgatcatgtgactttcctccctaaatcttttagcaagtcctcattgtctattcttctttcaaaaacatttatttgaaaatactattaaaatagaaaattttccacattcttacttcttaaaaattaatgtgttttaagtttctcctactccatttccatcccatgcctctttactcaatggatgcaattattcttctacatgttccttctggccatgtgtagctttgtcattttaattttaatctatttggaccctgtgttatctgggatgaggtagagtgatatttttattttctcaggtaattatttgcctaatgcctgtttccaaataatccaccatttccttacaatttaaaaatgctccagcatgtttttaatagctacacatatttgacacattttctggagaatttctgttttatttgtctatttcattattcttgtatcattatcatattatctcagtagctttgtggcaagtattaagatctactatgccaaatgtctattcactgtaccatttttcagaaaattctttttcaatcatctcatatttattcactcctgtagaatttaaaatcaacttatctagcctaacattaaacctcacaccctagaacaacaacatgtcgtagtaattctgactaaaattgctggaaatttatagatgaatttagggtgtattggcctctttatgatagaagctttttattcatcaatgtatgtttctccatttatttaggttttattttatgcccttaggaaaactaaatactgtgttcttcatatcattcttgtatttttttggtaaatttaataaaagattttataattcattacttcttcacattttattagttaaatccttcatggctcttgaaatattgacagctgctaagacttctgatgcttcccctcatggtcctgaaataaggaaggccagaggacaaaaagagattgagtgggcgtcattccatctatcacaggtgtaaagggtcattgacagcgccacataataattttgaattttctattaagaagaaaccctttccaaacataattttcacccagccccattgtcttctccattgttgtgggggctgtggcctgccgtgtatggataggtgccctctgtgacctcactcataccttcctgaatgaagactcaggagacttaggctggagcagggtggatctggagtggacatggaggttgtcaaggcttgtcctcctcagtccttgcaactgaacacctcatctgtacacaggagatcacacagccgacaccagcttaagatggcagatttttcaacatatcagataactaaatttttttttttggttatgccatagtttaaataaagaatgtattacttcatgggacatagaattctacaaatttcttctgctattccaggaaaaatgataagtcattgtggaaaacatttcctcatttggcattgccttggtaaagcatcgtgttgccaaatgatacaagtggctttttgaaagtggagacctttgttcaaatttctcaagtatatctgtgttgacacatttgcattttcagttactaaagagcttcctcctttcagaagtatcttcccaaattactaacaggccctggtgtttgtgggaacagaagggcttttcctttgatgtaatctcaaagcagtttcaacacaattgaacccctggaaattaaaaaagaaaaaaaacgacaattctctgaatacttttcctggtaatttagaaaagtagtgcattgacccactgagcctgctcttttttctctctatcgcccaggctggagtgcaatggcacgatctcggctcactgcaacctctgcctccctggttcaagcaattctcctgcctcagcctcccgagtagctgtgactacaggcacacgccaccacgcccggataatatttttttgtatgttagtagagacggggtttcactgtgttgccaaagctggtcttgaactcctgagttcaggcaatccacctgactcagcctctgaaagtgctaggattacaggcgtgacccactgcgcccggcctttctttttttgttgttgttggttttttatcttaacatttcttttttctgttgatgcttttcaagaattactgccttagaagaaagcaggcaatttatgaggaaaaattacaaactatcacatgtcacaaaacctatattcaaggacttccaaaaaagccagaagatgaaattgctagttcaaagttgttggattgctagtcatgtcatgaggatcagaaggttgagatttttgtagaagcttagaccagtgtgatagtagtgattggatcaagacgtttgcaaaagggactaggctcatagtaacttcgcctggtaagtaattttttttctgtttttattccagtaatgaaaaactgatagatgttttttagaaaaaaatgatcaaccttacctgaatatgtcacattcctggcctcagtatacgaacagcaatttttcagggtagctgaatgcctggcacttggtaggtgatagaaatattatttcctcttccagaattcaagttactacccaagagaggtctttatacactcaggaatacagataaatgtatcaatccccatctattcaacagctcacttcagaagaaatgtcactattcataaaatgctttttatttctaaaagcctaattgtacctgcttctaaaagcaattagaatgttttacgtattatctcaaatatgatctgcctgaatacaaggtgatttttcattttccagagaaaatttatacaagtttaagaaaatatgtattttcccctcccccaacttgaatatgtaaatttatagggatacaagtaaaaaagtgaaatgtctaattataacattcaatttcttaactggatcatacctcaaagttaaagattatatcaataccaatatcagttgagaaatattgccttttttgcccttatatttcattaaaatttttgttttatgcttcacatgcatgtaaagcatctatctcagagcaactttctaaggcatctcaggtctcagtgtccattttggattcctcaaatgatgatgtccctgaatattttactctaagaaacaatgatccactcacaaaataaaaggaaattattttttccgatttattctgttattctacacttgtatgaagtaagtaagaactacagggactttagctccaagtaataatgaccaaatccatgataaatttctttgctttttttccttttaccagtgctatccccaaaactagcattcattgagttcatttcatgtcggtatctcctccagttagtccttctggatcaaagcagagtattagaagaacattttttaatatgagagtttacacaaagactgtaccatacataaggcacctccccatgttgtgagagaaaaattttggaaaaaaagcctcattttaggttctggcactttctatctaaatttagtatgtaggtgtccctatcacagagctaggatttgcaaacatattctccattccttgtgtcttatttgagcttgaccttacaaaaccatcaactcctggggacaaaagagaaacatgctaaatgcacaaactctttgttatttatttaagctatctgtttctaaaatctatttgagaagacctaaattaaaatacacaagcacagtcagaccattaaatatatacagatgatctaaagccctaaggaaaggagaaggaaaaaggcctgtgattacctagtgaggagcacagtttaaaattttatgctcaaaagaaggagaaaaaggtaggggaatacatacatcttactaattgataaaaagaagcacaccaaattttcaaatatcatattttttctattactaaattggaaaaagacttcaatgcatgagtcctttagaaggaaatggaagagtgggcagtgccttcaacttccattttggaaaatgaaaggaatggtcatgaaaaacccactgcatattaccactgcatcagtgctatgggcatcctgacatttaatgaaatgcgcagatggtgatgctcagcagacatggtcaggcagataacatgtagtgatctaaagtgacaacagagagatggatttgaggaccaggcctcttgccttttctctacccattctcccttgaagggtcaagccaggtgtttcgagcgggactttggcataaactagacagaagtcagtttgaggctgaagtttctggtgaaacttggaaggcaaataagttgtgctgctgattagaaaaaggctcacttgttttgaaaaacacaagtgaagaatttccatacactgacactgactgcatatattagactttagccaatattccctttgattttcttaacacggcaggtaaggcaaaggataacctattaaagattgggtgtgtggaaggcatgtttcttgtgatgatggggacgatggctttgagaatcccagagcaaagtggaatgcaaacagaggaactgagaaattattcttcctgcttaattgctatggatttaactgccactccaaaatgctgaattttttttagtaagggcaatgcttggtcctatagggttaaaatgtcatgtcaaggcacacaatcatagcaaacagattgccaatcataacaatgacaccatattcatcataatctcttatatttccacagcatttttttttgaggcagggtcttcccctgttgcccagtcgggagtgcagtggtgtgatcaaggctcactgcagcctcgaactcctaggctcaagtgaccctcctgcctcagcctctcgagtagctgggcgtacagtcgtgcacatcatgctcagctaatgctttttgtatttttagtaaatatggggtctcactagatactgggttgcccaggctggcttcaaaattctgagctcaagcaatcctcccacctcagcctcccaaagtgctgggattataggcacgagccactgcactgggacctataacattttaatcaaattgcttttttatatcttgtttcattttggtctcacttcagtgttggtagcgatgttgaactgattttgaaacatcactgtttttagacaaataaaacaccaaaagctttaagttatttgatttgtggagcaacagaacttgttatgagcaaaatgaaccaggactggaaccctggtcttttgagaatcccagaccaccagaatttgaagaactcagggaaactgaattagagtttttgatatggactgaatcactgtggaattattataagaaactctttggcagtggaacaacacttgttgtcacaggtaagtatcggaagaatacaacatttccaaggtaatagagggaaggcaggaaatgattaaactggaataatgtaataatgtttagaaaaaagaggaattggatggggatttgatgtagaaatcctaggagagactttaaaacaaatgctcatactaaaagagaacatagataacatggcacagatatcataataggatttggctttgtgcatatacggacttccataaagggctcatatgtaatgtatgaaatgatctcattaaaatgtctggccctgagaccaaatgtattatgacaggttagtttgtgatagactctataaagcggacacatgttcatctctgatggtcaaagagatgttgactcttgttgtgaaggagcccgggtgttggagtcaggtccacctggaactctggctccactactcactgcttagtgaaattgagtgattattctctggcctcagttttctaatccataaaatgggataacagtatgaattcagcagggttgtataagaattgcacaacatagtgtgaattaagtacttggcacattgtccaacccaaaataggtgcccaacaaatgttttctggattcacatgtaaagagacaatgggatctactatggagagttgctctcagtccatctaatttacagagcagcaattctccagaggattcagctgtacttctaactgctcaaatggaaggttatcttaacatcagctcacagacaaaaattgaacttatggattcgtttcttgttagcagactttttaatcacgtggcaaaaacattgtattaagatgtctgttttttatttttgttgttctatgtgctttacttaatcctttatcttaattgatatcatttctaacaccaacatattggtcctaagatttatagccaattagtttagggttctgttcatatgtctcaggaaaaaaaggttaaaatcttaccaaaaatagtcaagatatcaaatcaattaaatccagttggaaacatcataaatctgaaatacatatttaaacataaaatggctataactatttagctagtgaaaaaataagaaatagagaactcttaaataaatatccacatgtagatttaatatatcataccgtctataaaactgtagttgatacttggtaaatttacaacgctgcattttaataaactacaaacaacttaggcaatttaactcaaatatactatttgattatgcaaataaatgtatataaatgaatccaacaggtttatttaaataaataaaatatatatattctatttgttactgaagtaagtaaaaatgtaccatacttgaccataaaaaacactcttaatatgtacattttaaaagtagtattttaaaaatcatgtgagaggatgatccagaatatcggcccttaccatgtataatcgagtatgctatttaatgattcgttaactattaccttgagaaagttatggaagttccagattcattttgtcctgaaaagaatgaaacttaaagaatctagctaaagaaaggggcaagagacaatgaatgctgtggtaccgtacagaaaatgtccaagtttatcatttgatttttaatttctttagtacaatgaattagaagtatttcaatgaagagacactagttcttaggatgaaaattagattggaaaatacattgactagagactaaaattatataaatataatgtacaattgaaaaattactcatattttataacatgcttttaaaattagaagcaaactatatggtggagaaatatacactgtctcacaagtataacaagtaaaatactatttgcactaaaagcaaagagtatgaaattaagatgagcacattatgcctaattaaatttatagcatgctcacaaattaatatttctgtatatgtttactaattttgtatgaaaatcagaagctttgctacacagacagaaattatcaagattgttttcttttcttctgaaatgagaaatttaattcttattttcttaagaaattgttcaattattaaactcacttcaaaccagccaaagcattggagtttcaatgggaaatcaaaatagaaagaattgtaacatttataatttcagttattagattaaaaatacgtgtataacccattaacatcccagattcaagtgatatgcctttgtaaacatatgatgctttgttatgtatcttgaccctatccctataagaagctctgaaatcatgacttttaatagagcaattacatactcattttattcagcaggctaagacaaagagaataatggagatttaaaacagttaaatagcatattaggacagatacaaattctgggagagacataaagagtcaaaatatagatacactgatttacatagaccttctcattaatggggtaaatttatataaaaaccagtataaaaattacacccctggtgcattcttagtcattcttaaacttcaaatgaaattccaaaataaaatgtgcttttggtgaatattttctaaagcaaaatgaaattttgataagtgcattactggagaagattaacacaagagtatttctgaaaataatcaagaaaaaatttaaataagaattttggaaatgttgccattttgtttctaaagtcaagagatggtgaataatctggaggtacagctgtaagtactgctgcatcccaaaacttggagggtgcagatgtgaaattgagatgttatataaagttagatattaactagggggactgctcatggtatacacattgaagctacatggtcaacttgatagacagtatgtacatgcggaagtagattctctttaaaacaagtgactgtgtatgttaaaaataaaagtgaacaaaatggctaggcatggtggctcacacctataatcccaggatttgggaggctgaggcaggcagatcacttgagcgcaggagttttaaaccagcctggtcaatatggtgaaatatgtctctagaaaaaacaaatattagccaggcatggtgatgcatacctgtagtcccagctacttgggaggctgaggtgggaggatcacttgagcctgggaagtcgagactgcagtgagctatgatcttgccgctgcattccaacctggacgacagagcaagccccagtctcaacaacaacaacaaaaattttgacattgattcatatgggaaataagataaataacaagataaatatggtgcatcgcagaatcagttaaatgaagagtggaagtacacgaaattgcagaacatgagaatgtgtcatatttggccaaagaacataagttacaaaggatggaaaagggaagtgagaaaaggaccaaagagtctcatctgtagagagatcattaaggttttctgaccttccactttcccctgccatccaccttgaaaacctgcttcactgtgatgaaacaaaagagatttaaaaataaaataaatatgctcatgaactttggaagccctggtaggaggcagttaaaaatcacactcatcacagcatgtgcagaataaacaaaggccaggttttcgtccagcatctgacacttgagagctgtgacttttggcaagttatttaatgtcttgattctcttttcaacatctgtaaaataagcacaataataagtactgtgcagcctatcctggatgaaaggccgcggtggacaccagctcaatggcatcttctctttttatggttatgtactaggccactccaaaccgtgcaatgtgtgtgtttctctaatgattcttttaaactcatatttcatttctccccatagataaacaacttgatgcagatgtttcccccaagcccactatttttcttccttcgattgctgaaacaaaactccagaaggctggaacatacctttgtcttcttgagaaatttttcccagatattattaagatacattggcaagaaaagaagagcaacacgattctgggatcccaggaggggaacaccatgaagactaacgacacatacatgaaatttagctggttaacggtgccagaagagtcactggacaaagaacacagatgtatcgtcagacatgagaataataaaaacggaattgatcaagaaattatctttcctccaataaagacaggtatgtgtttacacatatcatctgtcagaacacttctttgaaagtgaatgctgcattttttcctttcagtattaatgaaaaacataaatctttcttaaaaattgttacatttaatggtagcgtaaatgccctgctacttttctatagaattaaaatggtataggttttggagaaaacaaaattgaaaaagttgctgaaggtttgtcagcctcagctccattatccaaaataagaaagtcacgtgctggtttttagggttgttagatggattaaagaaacaacatacacagaagcatctagcaacgtgacacgtggtaaacgctcaaaaagtgttctcccttcttttgatgactttacttgatcaggaaataacatatatatgtctttcaggaatgttctgcccaagcaggagagtcactcacctcaatcttgctacccacaaagtttaacctaaaaacaacgggttcattgttgacaaaataatgtttatctgaagataactgtagatcatatttatctgtagataatgtttatctgtggagtgtggctctacaaaacatagaatagtcttggtcactgcagttttatagaggccttgggtttttcagagtttcattttatatatcaccataaagtaacatttcataattacaggttggtaaggcttacatgtacaaacattcttccattttccataataaatgcatttcctgccattggtgaatgcagctcaataaacatttattgtacaattatgacacgccaggcttagtggaaatgtggatgaacagacaaggatgagttactgtcctaaggatgatgcatgacagtgcagagaatatactctcttcctgatcactcagggtcactcatgattcatgcgcgaggtcccaaaacagtgcctttgatgcagattctgtacatctctagacgattggtccaagggctgaatgtgctctggcccagtggtccagtctgtcactatatgtcaacatcctgaatatgaacataacagtccaacatctcaagagtgggcatgaaaaggactcattttgtgctttttcctgtggttaacaagtcctttttagcctgggggaacaagcattaacaaaatgtttgaagatctttgccacgtaccattccaaatttctagggtaagtctttagcttttcagatcctgagtttctgcaatgatcaaatgtgatttggacagttgcgttgactttctcctggggctataatggagtgcaaaggaaacaatggcagggaaaatgcttgctttcaaaatggtagcatggatgtgttcattcgtgtagttactgtattaggtatagcctttcctgaaactaactgaagtggggttataaaaacagtcccaattttctatttcctttgctgagacacaaagaggagacaaaagagcaaagcttgagggtagttttaccactgtgcttaagtgttctgatttttccagtgatcagggtgaaataaaaagcatagtaagttccagggcagtgaataccatacaggagacaagttacagttttataatgtgttttactttacactaaattctaaaagtaaaatgtctttttttttttccgagacagagtttcactcttgtagcccaggcaggagtgctatggtgtgatctcggctcacagcaacctccacctcccagtttcaagcgattcttctgcctcagcctcccgagaagttgaaattacaggtgcctggcaccatatctcgctaattattctatttttagtagagatcgggttttaccatgttggccaggctggtctcgaactcctgacttcaagtgatccacccgcctcagcctcccaaagtgctgggattacaggtgtgagtcactgtgccggacctaacagtaaaatgtctttcatgtgcttctcaaggcaactacattaaggaggacacatctcttaatgtcattctacagtagatttctaatgctctttcttggaagtttgtttttctgagaagagctaaaaatataataacatggaagtgatcatattatataatcaatgaagtgctttcaaaggagataaaactaacctggtctgcatttgcaaccagccttgattgagagagagagaactcaggatacacttagagattttattatggggaatagttactttattcattttacctcaatcaatgcatggaaataagtgacagtcattttcatttatcttttaataaataaagtcaccatgaggaaaatgaaaacccattaaagtcagtccttaaagatatttggacatgcagacatgataactaacatttccattcgtgagacttacccaaaacctatacctcaagtccatttcttagaatacatgaaataaagatctcagtgagtgtataaaactgcacaccagaatcatatccgtatagacaagaatacatctactagaaaaatataaaccaaaacaccaaggtgactctgtttttttctgttttaaaatatgttgtctttgtatgcatgtttgcttcttcctttttttttttaaacatcgcagataaattcaactctcacctcagttgagagagaactgtcaatgtgacttggcctctctctttctagtcccagaaagaattgcactgaaatgctgagctcctgtaataaaaatgaccatttgctgagagtaattaacatactgaaagagattttcttagaatagtgcacaatggcccaatggtgacattatattgtctctttataaattattttctatctatttctgtggattatttctacaaagcacttttcatatgtccaattccttttattcccctacaagtactgactgactactggctctgctgttcactgatatgactttcggcaagttgcctgcactttttaaacgttatttcctcattcagaacatggggccatacaaaatacaactcacttcagtgttattggggaattaaacaaataaatgcatgggaagcatttaacatagtgcctgacacaataatgagcactcagtagatgttagcttttattaatattgttgttgctatgtccagaaacactatacctccagaaaatcatgggtacttgctggggacgttggggatatgcatgattttgaaaggagtgactgctctttactgctcagatgagaaatttttctaagccagactccttcaaacatgtaagattctgttgtggattctaggactgaaagaattcttggccgagtgtggtggcttatcctggtaatctcatcatttgggaggacaaggcaggaagattgcttgagcccaggagttggaaacaagcctggacaacatggcgaaaccctgtctctacaaaaaatacaaacattagctggtcatgggagtgagtgcctgtactcccagctactcaggaggctaagataggaggatcacctgagcctgggcagtttgaggtttcagtgagccgtgatgacaccatactatactccactccagcctgggtgacagtgacatcctgcctcaaaaaaacccccaaaattattctttttgctgatttcatgtcagcagtgtgtgctgaaggctgtaaagtagccacttgttctgtttatttttccattgaacaagtatttatcaaaaacgtactttgtggaaggcactgtgctaggaactatgcatacagaaggaaaaccaaatgttcttggatactacactccagttgtgataaaaaagaaaaaagtattcttcacaaacttcaacattttgatgtgcaaaaacataatatatgaattagatctacctaactacacagaattagaccaattatttctgggattatgggctcatatttttaataactgtcctcctacctctctgttgacaggttttataaatattcatttaattacacacagtcacagacacactcagacacacacacatacacacacacacacaccttgacaaataatgggcatgaacaattgactggtacttgctctcattcttctagatgtcaccacagtggatcccaaatacaattattcaaaggatgcaaatggtaagtttttgtgttttttatttcctcctgatcattttaagttttgaacttctctggcttgaaaaatcagggaatggattttgctaggttggatgctgcagaatggacctaatcatattttaaattagtccctctttttctaggagttgtattaacaaacctaactactgcttcatgtaagagatgactgtaaattgaagggtacagtgatatgctttcagttatttcaaaaaacagactttactcatccatgtgtcttttttcttttcttttttttcttttttgagacggagtctcgctctgttgaacaggctggattgcagtgacgcgatctcacctcactacaacctccgcctctggagttcaagcgattctccagcctcagcttctcaagtagctgggactacaggcacatgccaccatgtccgggtcatctttgtatttttagcagagaccgggtttcactatgttggccaggctggtctagaattcctgacttcgtgatctgccccctcagccctccgaagtgctgggattacagacgtgagtcactgtgcccggcctaacagtaaaatgtctttcatgcgcttctcaaggcaactacgttaaggaggacacttctcttaatgtcattctacagtagatttctaatgctctttcttggaagtttgtttttctgagaaaagctaaaaatataacatggaagtgatcatattgtataatcaatgaagtgcttttcaaggagataaaactaatctggtccacgtttgcaaccaaccttgattgagagagagagagaactcaggatacacttggagattttattatggggaatagttactttattcttttttcctcaatcaattcatggaaataagtgatagtcatattcatttatcttttaataaatgaagtcaccatgaggaaaataaaaagacattgaaaacccattaaagttagcccttaaagatatttggacatgcagacttgataactaacgtttgcattcttgagacttacccaaaacccatacctcaagtccatgtttttagaattcatgaaataaagatctcagtgagtgcataaaattgcgcaccagaatcatatccgtatagacaagaacacatctactagaaaaataataaaccaacacaccaatgcaactgtgttttcttctgttttaaaatatgttgtctttgtatgcatgtttgcttcttccttttttttttttaacatcacagataaattcaactctcacctcaggttttattgagagaactgtcaatgtgacttggcctctgtctttctagtcccagaaagaatcgcactgaaatgctgagctcctgtaataaaaatgaccatttgctgagagtaattaacatactgaaagagattttcttagagtacacaatggtgacattatattgtctctttataaataactttctatctatttctgtggattattcctacaaagtacttttcatatgtccagtttcttttcttcccctacaactaccgtctgaatactggctctgctatttgctgatatgattctcggcaagttgcctgcactttttaaactttatttcctcattcagaacatggggccatgtaatactcatgtacgtgagtattacgtaataatgctcacttaagtgttactggggaattaaacaaaaaaatgcatggcaagcatttaacatagtgcctgacacaataatgagcactcagtagatgttagattttattaatattgttgttgttatgtccggaaacactatacctccagaaaatcatgggtacttgcttgggatgttggggatatgcatgatttggaaaggtatgactgcttttttctgcttagatgagaaatttttctaagccagactccttcaaatatgtaagattctgttgtggattctaggacggaaagaattcttggtcaggtgtggtttcttatccctgtaatcccagaattttgggaggacaaggcaggaagattgcttgagcccaggagtttgaaaccagcctgggcaacaagacgaaaccctgtctctacaaaagtacataaattagcttggcttggtggtgtgtgcctgtattaccagctattcgggagactgagatgggaggatctcctgaacctgtgaagtttgaggcttcagtgagccgtgatgacaccatactatactcgactccagcctgtgcgacagtgagactctgcgtcaaaaaaaaaaccccaaaattattgtttttgctgatttcaggtcagcagtgtgtgctgaagggtgtaaagtagccacttgatcagtttatttttccactgaacaagtatttatcaaaaacatactttgtggtctgtttttgataaataaaaaggcactgtgctaggagccatgaatacagaaggaaaaccaaatgttcttggatactacactccagttgtgataaaaaagaaaaatgtattcttcacgaacttcaacattttgatatgcaaaaacatagtatataaattagatctacctgattacgtagaatcagaccaattatttctggaattgagggctcatatttttaataactgtcctcctgcctctctgttgacaggttttataaatattcatttaattacacacacacacacacacaccttgacaaataatggacatgaacaattgactagtacttgctctcattcttctagatgtcatcacaatggatcccaaagacaattggtcaaaagatgcaaatggtaagcttttgtgtttttcctttcctcctgatcattttaagttttgaacttctctggcttgaaaaatcagggaatgggccgggtgcggtggctcacgcctgtaatcccagcactttgggaggccgaggcgggcggatcacgaggtcaggagatcgagaccatcccggctaaaacggtgaaaccccgtctctactaaaaatacaaaaaattagccgggcttagtggcgggcgcctgtagtcccagctacttgggaggctgaggcaggagaatggcgtgaacccgggaggcggagcttgcagtgagccgagattgcgccactgcactccactccagcctgggcgacagagcgagactccgtctcaaaaaaaaaaaaaaaaaaaaaaaaagaaaaatcagggaatggattttgctaggttggatgctgcagaatggacctagtgatattttaaattagtccctctttttctaggagttgtattaacaaacctaactactgcttcgggtatgagatgactgtaaattagagggtacagtgatatgctttcagttatttcaaaaaacagactttattcatccgtctgtcttttttttttttttttttttttttttttgagacggaggagtctcactctatcacccaggctggagtgcagtggcgcgatctcggctcaccataacctccgccttactggttcaagcgattctccagcctcagcttctcaagtagctgggactacaggtgcacaccaccatacctggctaatttttgtatttttaatagagatggggtttcaccacgctggccaggatggtcttgaattcttgacctcgtgatctgccccctcgggctcccaaacttctgggattataggcgtgagccactgtgcccggccttctgtcttttgttataatgactggggaaaacatgataccatgttgcttcttgagttgttttgttttagtctttggtctttgctagtagctaataacacgaactagtgtttatcaagtgctttttacacagaagggcttgttctgcattttctagtttaatcatcttaatactcctataaagtagtacaatatattttctcccattttacagtccctttaaagtaaataactataaaaatcccttatacatgtcacacagctaggtctggcatttcaaatcaggacatcaaacaaagaattcgtgcagttactaagtcctctattttttctacaatagaaaaaatagcaagaattacagatagcaagacattacaaggcaggaatctgaaacgaaagggacataatgtggggctgggtgggtgcatgagctttgcagactagactttcattccagctcttttaatgattaggtgtaagtgacctacattttgtgagtaacagttttctcatcagccaactaagaataattacaccagattcacagttattgaagagataagggcatgaatgtgagatgtctggcgtagggtatctcatttagcagacacagaatgaatacttgtttctggctttttctctctacatatgcacaaagaatgtgactagaagcattggctctagccctgctcaactttcctctatttccaataccaaggggctctgacttaggctgccacaccaggcaaggaggggcagtaccacctcacttgaccaagggcagggagtcacggacacatcacttcctgagatccttttccacaccaaggactgatgtttctggaattctcactttatgaagacaaaacatataaatggaaatttctgcaggaagagactcactcttgtagctcattgagtaggcactagtggtccacccccactgtctttacttattccttgacatcacatatctcttgtaaaacctcaaataatgttaaatgcaatcacccaataatagcatagccataattagaggcatttaggaaagacaggtgagtgtgccacaactacctaacacatcagcaaatctggattaaccactttctttgattttccacaatgcaaccttactttttaatagttgggaatgttctaagtgaatttagcagaggttgttaatcaacttgaaagctgaattctgacttgtctgactcttggtggtgctggtagcagtagatgtttacttttaggttttggtggtggtggaatatcacttcaacgtaaatcatcagaaataagtatttgtgaacccctctcgcattaatatatcttattctgtaaaaagaacatgtgcaatttctcttagatacactactgctgcagctcacaaacacctctgcatattacacgtacctcctcctgctcctcaagagtgtggtctattttgccatcatcacctgctgtctgcttagaagaacggctttctgctgcaatggagagaaatcataacagacggtggcacaaggaggccatcttttcctcatcggttattgtccctagaagcgtcttctgaggatctagttgggctttctttctgggtttgggccatttcagttctcatgtgtgtactattctatcattattgtataatggttttcaaaccagtgggcacacagagaacctcactctgtaataacaatgaggaatagccatggcgatctccagcaccaatctctccatgttttccacagctcctccagccaacccaaatagcgcctgctatagtgtagacagcctgcggcttctagccttgtccctctcttagtgttctttaatcagataactgcctggaagcctttcattttacacgccctgaagcagtcttctttgctagttgaattatgtggtgtgtttttccgtaataagcaaaataaatttaaaaaaatg

SEQ ID NO: 98 - DNA, 21051 bp, Homo sapiens
tatttctcatcatagctctatgagttacatacctgccatctccattttatgcatgagaaaataggcatggagaagttaagtggtttgcctaaagtcacacagcaaatttgtggagagctgggcttgaactcaggcatctgggcttttactctctccagtggaatgcctgggctgtgggatgagatgacttcacaggcctctcccagctccagagttgagagagagagaggagtggtgcagggaggtagtagggatgattatgctactggccaagttcaagaaagtcaattgtagaacaaggtccagctgattattacagagagcaaagttcttaactagaggacttcctcctggaatgtggagagtccacacgggcactagcagagcataatgaaagaccaggaattctctgctgttcaatcagtgctccatcactcagaggcagggctgcaagagctcctagtgtgtccccttcgccttcagggcctccctgtacagccacccacaggacagtgcaccagggtcaggcagggaagtaaataaaaaaaggaatctgataattcctgacagtgagcagcagctgatgcttttaatgggggaggaagactgggaatctcgcttgatgatgacctaggacttcagtcagcaggacactggcccctttcctccccctcccaggctgaaaccttgtgttttgccttatgtccatggtaaccaagtctcctttttggtgaggaggaatgggcttcagtaaacagatctatttgtgtgatcctgttactcatttgaagcaatgtccctccttttttccactgtggtctgtgtgtctgagtcagagagagcctacaacagggttctttgaattgatggctcactcccagccactcttgactgactgccagcttagcagggcgtagcttaccaacaaatcttttttttttttttaaagccagactgattcatagaaactcctttaaaacacggtgaaaagaaaccgcccattacacaccccagtacaccagcagaggaaacttataacctcgggaggcaggtccttcccctcagtgcggtcacatacttccagaagagcggaccagggctgctgccagcacctgccactcagagcgcctctgtcgctgggacccttcaggtaggacagctcccaacgctgtggggactctcagcaaaacttctccttcctttccacggctctgcttcttctgacctcatcttagttttgctttttcttttcttccttcgctatttttctatgatcctctaagaaccaagtccttgaaacttttggctcaaagtggatacagagacaactttttctagaaagttcagaaaagtgtattttgaggacggagtctggggaaatcaatgggatggggctaaaatcgtgcctggcagtgaccgggttcttgttctaggatgtggagggagcagggactttgaaacaaactgggataggatcctgtttatggaggaaacaccacacaccttggaaatgacatcgggaactggccagatgtttttcacctcctccgttttgattccgattgcttcaggacttgaactgttactctgctcgctggttgttggttgggattttttgggtggtggtggatagataactggttttcagtttatttttgacattgcttttcctgcctgtttgcttccctattcacttctgtttaaatttaagtattttttttctcctcacaggatgggaagagggggattggtttgtttaaagaaaactgttggccgggcacggtggctcatgcctgtaatcctagcactttgggaggctgaggcgggcggatcacctgaggtcaggagttcaagacaagcctggccaacatggtgaaaccctgtctctactaaaatacaaaaagtagccaggcatgatggcaggtgcctgtaattctagctacttggtaggctgagacgggagaattgcttgaatccgggagatggtggttgcagtgaactgagattgcgccactacactccagcctgggcagctgagtgagactctgtctcaaaaaggaaaaaaaagaaaaagaaaaaaaatgaaaaaagaaaactgttagagagagaaagagagggaggcaaatggtgttttaaatgaaacgtgggaggggttcacttggtcgaagcaggagctgatgaggattccagatgccttctcttggccagatgtggagggcgggggaggcaaaagggaagctgggtttggagaagagggtggggcaggagaacttcatctgtgcctgttaaaaattgttgagtggctttgtgctttcaccccagaaagagctgcctttcagtgctgagtgaaaagatggcataccagaaacgataaaagaacttttaaaagaaagtggatgtggaatttctttgcatggaaggcagtgattgttttgaaatgcttatcttttctcttgttcccgaaatgtgattgtataaatgcaaacactcatgctaatcatgaaatctggaggaatgaagaagggtgctttttcttttttttctttttttctttttttcggttagcattttgggtgagtgtctaccgaggtgtggcccatttcaacatagacactggtatattttttccccaagtaaacaagatgagaatgacaggattcagcttgtctgacaaagttaggcttttcctttagaaaggcagtacgttgggagagaagttacatgtaatcaaccctgtgttgagcaggcaatgctccttgtaaaactgccccaagggggacgattgagtaggcatcagggcaacttttcaagatgaagggaactcctacatttgcttcacatgtttattatttccacattacatggatgtggattagccattattaaatcaatagtgttaatatcctgtgaaaattatacaaatcttttagttctgtgcaggttaaaactaataaccagtcaacacacggaaagccctgacaatgttgggagtgtaaaccatcatgaactgcattatttgtggcaaggtttcacatgatactgtaggtttataaaggagaaaatatgctacatgttacttcctggagtttgaagacaatttagaaaaataccgttctgattcctgctctctgctcttcctccaagaagtagtgaaagagtcccttagctgtgagagtttttctggatttcagctttgacaatcccgaaatgtgagggttatttttcccccccactctgcccgctgcctcccaccctcaggggcagatccaattccacccagactccgaagaatggggcgggggcgggggctgcaggacatcctgtctggcgccctggtcagagggccccccacatttacattgtttgtgggtactaaactgtcttgggagttggcaaaaggccatcaagaaccaacttggagcaaatcacatccttagaatctggctatctcccaggactgctgggcagaccgctggggaaaggaaagagatcccttctgtggagagtggaaaggactcactgtgccttcctcagcccttcctgcttcctccagagaccagattaggcccatcaagttcccagccttgtcagtgggcttcatggagacccctcacccgggaatgtagaccctcttggcttgctctgggtggctctagggatttcaggtagtgccagacccacagggactactggagagagacacgttgaagaccggggaaaacttgtggatgaggcaagactgcttttctgtagactctatggagcctggtggggcacataactgaaacgtggacacaggaaagggcaggaggcaagtcagttccatttcatccttcatttcgttcacagaattctaaatttgggagggatcttggatctcattcattctcctactgtatgcagaaatctaatttttacaccatcttgaacagatggccatcctacagatcttaaaatttccagatgcggggagctcagaacctcagtgtgtacctccacactcattccccttagcaggccaactctaattttattaaagttccttaaatcaagcaaaatcaacttccttataacttcctgattctgctggcctgaaacaactcagaaaatatctattctggttttgttgttgctccacccaatgattctcatcctctaaacacttaacgcctatttaatatttaatgaatacaacttgatggatctacattgcattatcttttcttcttcttcttcttcttctttttttttttttttttgcctaaggctcagaagggcagggagcatttttgaagtttggaattatgtacatagtcaatcatactcacggggtttttgatttggaggtatttaattttctaaatgcatgaatatggttccttctttaacctcccacatgtatgtacatagctgcctaacacaaaagctcaggcctatttgggactctcagatgtacatactcggagggacacacccagtgttgctacctactaggtcatggttagatcaatccaataccaggacacaggcttctagctaggccttttggggattgtcccataatttggtccatagttcatgtagcccacacctatacattgtcaccacccatcatagtaattacgggaacaggctgcccatcaaatgtagcctccttgtaattgctggccagcaatctgggtatcagccccttgagaagagctcctaacccttaaccagcgtagaacgggaattttctcaccataagcttcccttttctaatactcttcccagatccgcccaggtgatcttgaatttctggactgcacttgctattcagtaatcaaggaagcccaaatatggttccagttaggggtttacttgaatcttcagcacccagccccgacatacacacgtcctgagactgctctttgcaacaattcagtccctggtgtcctgcctgggtaaaaccatttccttcaatttacctgggagattcactgatactaaagcagaaagatgaaagcacaaacacctgtggtgattgctgcttctctcttcctttttaacaaaatgtttgggtcaaggttttcttttgtgttgtggagatggcatttccctggaactgcaatggaatcctctgctgttggtgcgcttggacttacgtggctgtgacagtttttctatttgctgagcctgtttcatgaattgtttcttcaaaccgggtagttaaactagagagccctttcagcacaggttgaaagcgtggcaagaatcctggagcagatgtaagacagctgactaggaagacagaggggcagtggtgttatcttgacgctgccatgtaaccacaggcgagacacttgtcttcttgctttcggaagttgaacttggtggttctttcagaccccttatggctctgagattctaagattcacccaggcgtggtaatcccagctacttgggagactgaggtgggaggatcacttgaacctaggagtttgagaccagtctgggcaacatagtgagaccctgtctctaaaagaagaattttaaaaagcagggtgtggtagtgcatgcctgtagtcccagctacttgggaagctgaggcaggaggattgattgagccccagggctttgaggctgtagtcagctatgattgtaccattgcactccagcctgagcaatgaaacaacaccctgtctcaaaaaaaacaaaaacaaaacaaaccaacaaacaaaaacaccaaaaaaacgaaaaacaaaaaaattaagatcctaccatttctattttgagatatcccttgcgctgatgctagcagctggcttaatctgtaaaaattgatagaaaagtgaaatagggcaacgtgtggcattgaaaagggcattttgcagaggattctcgtctcctgggtgccttgaggacccacggagcctcctctgccccatccactcacagattctttaggtatggtgttccccggacttaccctcagccatgagcattcactcggcactaggaataaaagaaagaggtttgagtaattaaacgtaaagggtgccagctcagatgaggagggcaggctgagtctgtgaagacattgacaacagcaaagcattcaccaggaacagaatcaggctcagggagaaactgagctggctctgggaaagaaactccaccctcttcttgaggagggagaccctgcagcatgaaggtgtggtgtacaggtgtggacaggagcaaatgaggaacagtttgagaggaggaagaggaaggtgcaactaggacaggagggagggagggagggcaagtgggatgctgtttcccaggcctgtgtgttgagggaggaggcaggcagaaagacctagaagcaggagaaaaagctaagtggatagagaaagacagaaagggggcaaaagagcaagggagaagtgatgaggatgtttccccttccatccttccactcttgtttggggaccacccaccctcaatgtttcaaggcagtccttcggtcaaaattcgattctttgtcccctgtgaagaatcttttgtcgcattggctacttcttgttttttcaggatggttgacacctctttggtatcattttagtttccactacatgtgcccaccaggctggaacctcttcaatgtttctcctcttccaggtcagatcagagctgagagcaaaacggggttcttgatccttagacttctcatttcaaagaatcaaagacccttccccaggacgctggagaaggggagttggacagaggtttgcaaccctgaaacaactagtttggggcaaggcagtgtgttcacattgatctcagagaaagctctgaagctgagacctggagcttccctttattgaaagatagtctccatgtctgggtggggtggggactcctgtgctgagggttagaaggttgctcggagtttgcagggggatattgttcgggtctgttttggccaggcaggctggctctgctgggtgggacttctcagcaaaacgacagggagaagcagtggcctcggaagaccctgtgtttttataattggcacagttttaaggggtatatgctgactctctgattaactcagagagggtaggaggaaaagagagaacagtagatctggtagaagttctagaacttccaccaaaccctaagccaagagacaggagagaaaaaatcatgccaggtggaagagccctgcctggaaggtgcgaaatggcttcagttctgattcaattccatttctcctttggggacgtgcatttccttcttatcaaggggttggactgaatgacctcaatgcctctcaacctctaaagaacgaattgaaatgaagccctgagcccacctgatgggtctggggtgtctctaggcgaggggcctcccctcccagcttgccgccttccaggaggctgcagctttgctggttgaagcatgttgccgccatctactgttggtcccacccaagcgccgctggggccgggccacacctaggttttcttcccaaacccctagttattatcttggcaacctctcccttgaagacattctggctgccagaacactcgtttgtcaaaagcagaaggcaactcacgcttccgtcctcgcccagggaacatcgcctgatcccttgaccagctgcagtctgggggagtaggctgggccccaacttcacagcccaggtctggcctcagtctttgcagatgttgcccagatccacccctcccctggacacgaaggaggacaagcggaaataagagagagaggttattcttcttgggagcatttgcaaaaacaatattcatgccacttgtttgcctttagcataattgttggccctcaggctctgccagagaagcataaagcccatttccccggcccgagcctctcattttacacagaggaagagaccaaccaaccaggaactgtgtggcccccactctgtgcctggcacaggccttcagccctcatgctaatcctgtgaggtctacaggtcacagttcagacatggtggagccaggattggagctgagaatccctgctctgtgctactttgaactctgtgcctgtaggagccactgaccagagaggttatgtgatttttctaaagtcagaagttggtcaggggcagatttattataagaatctggttctccaataggttctctctctctcatacagtgtgcttgccccactcccaacccacaccttggctcctcacccctgactatgtgagactctgtgctagtctacacagcaccagaccaacacgacttgctgtataataacccccatttataatagcctgcatttggaagatgaaaaaaataattgttttccctgcagcatgtaggtccctgttacttttgctgcttgattgacgatgtttctcctggttgtaaaaactgccctgtattttccaacatcaagtcctacctgaggttccttccttccacaccaaacatgagctatgcagaggccggaggaaatggcccctgagaatcctttttctccccatgtttcccacggagaaattaatcccctgctttcccacccctgcataaacacaatattgagaatggaaaagtacacttgatataaaacaacaataacagtggccagagaggctcatccaaggtctcatccactcagcctgcctttaatcccagtcttttcctcctccagacacatcctctccggctgcccccagaagggagtgcttccttttctgcttttgtgttacatgcgcatccattttgccaaccaaatgatccttcatgggaaacaaacacatcaaaaccaaaccaacaaaagcaaaatgctcccgacttgcgcagaggacagaaaggctttcgtgccaccctgcgtggtgtcttaggaaggagaggcagctgcggagtttcaggtgtcacgctgaggaaggtggtgtggggtcgtctgactcatgggggtcagttgaccagaagcggctacgcctctctctctcctcgtgctttggaggaagcaccacgtctttggtcagatgctgtgagaaagctttctccaaagtttacagttatccagaaagagatcagaatctcactgtcagaaaaacactggccagcaaaaagacagggagtgtctagcagtaatctcaggactgtgttatgacttgactgagattttgagatctaaggtgaaggcctctggtgaatcttctgataacctggtagttctgctgtgaagacaaccatgctagaaagaggaagaattagtctagtcaggtaatctcaccggcagaattaaaagtcatggtggtcgttgcaaagagcacactcggacgtattgtcagaaaaatctttctaatcggggaagggatcctggtaggtagtgagctctccatgactggaggaggttaagcatgattcagatagttctttggtcagatttgtagatgactttcttgaattgaaaaggaattttaaagacctccctcttcagtcctgagattctataattcaaagaagtagagagaaagattaaatctgcagacaaactagtgtttagaaatttaagacattttctttgcattcacttatttcctcttgaacaaaaggcaacacacacatatatacccttgtatattcaaatgcactcaggaaacagtcacatatttacataggtatttatatagaaatatataacaaagtttgcatacaataagatgctcaatacatagttgtagtaaagtattaagcaatttctgaaaaataataaaggactaaagtctatgtatgttaaaaaaaaaaggaaatattttccctctataattctgtgtttattatgaagtcttcagtcattttgacattgattatttttccatggggaagaaaatatggccatccttaattcatttatttgttcattgaacagatatttatttggtacctgtcacaggcaagactctcccttcagggacttaaaatcttagggctgtcatcagtggttttaataaaaagctatgtgagggcaatagaagaagagagaaaagaaaactgctcctaacctatggatctgggaaggctttttagaagaggtaggattttagcttggttgaaaagaatttgatagactgtcactgaaagaagaatacaaaagcagagcttttatttttggaaatccaagtcctgggattgcaagggctggcttgaggtgcgtggagcctctttcctgctgattggtggtggttagaggtgggggtttggaggttcttgagcaggggagtgccatggtcagataacccagtagcagggtagaagatatgttagaggggagttgttcagagacagggtcatgggtgaggctgatgccatggtcaggctaggacctgaactggacagtagcaatgggaatagaacataaggaaggatgtgagataagtaatggaggtagaaactcagggtaggactgtgatgttttgggcaacaaaagtggaatgaggggaagggaagataggacatttggcagtggtcattactgctcttttctccccagaaaaatcctggcctttcttaagctgccagggaaatgccagccagatccataccctgcttctcagaaagctctctcgtgcccttttgtagagaaggtctccatgatgcctttcattctgggagaatctcacccactctcaaatgaatcatggaaatttgagccctgagggcctcccccagtgtttgcatcgtcttcagctcctgatttctgagcatgctcccctcccacccctcagctagggctaattcttcagtgactcaagccccaggattttgaccacttccttcactggggaagtgggtttttggttgctctattctattgtgttgctcccagttattgtgttttaggtcactcttaaagaattgctgctgccgccaggccccatggcagttcagtgaacacacagacttctggacaggaagaagttatctgactcctaggttagcaatcagggaaccaaattatgcacctctaaacttcccttctggtccttagaagtcaattcttctcaaagtctctgcagatttagttacccaccagaaaaggaaaggctcccatgggggcctgagtaatttctcactggtcagagaaccctaaaagtgttaggctgcctgaacaaaggcaacaaggcaatgcatggcagtctcagggctgtgttcctttgattctttcatttgtgtgtgtgtgtgtgtgtgtgtgtgtgtgtgtgtggtgtgtaagagggaggcaagaagccaataaagatttaaatggatggagataacttgagaggtttggttatccctctttcccttccctcatgtctcatattagttagtcctttagagctatagtcacgagcaattttaatcctcagggttctattttattttattttgagacggagtcttgctctgttgcccaggctggagtgcaatggagcgatcttggctttttgcaacctccgcctccctggttcaagtgattctcctgcctcagcctccccagtagctgggactacaggtgtgcaccaccacgcccggctaatttcttgtatttttaattgatactaggtttcaccacgttagccaggatgatctcgaactccctcagggttatttctactgactatattagctattctgttagctaagaactttatctgaatactgaatggtcagtgtttgtgaggtttgcattagagctaggagcacaaagacacctctgctctagtgtggtctgggcaatgcagaaagaaaaggaggaacagtgatcagaaacaaaagatggtggtcagaggtagggaactgcaagcctgtccgttagggcagaaagaagaacagaaaagggatatcagagacctgtgtgtggctccgaggtgctgatctccatttctcttaataatacttctctccagagtcaacatacatgggtcctataccttcctcagtttcccacccagcccctaactgcccctgtgccatgtatgttaggtagatgaggcttaagaaggagatcatcctccactcacagtggtgggtacagaaatgtgttcctggcatccacatagaagtcagtggacggcctgttctttaaaaatgcaatgaattgataagctctgctggcctaggtctgggagtctaagcaccacaaatgaacgctgttatgagcgttcccctacaactttggaactgctcagtgcaccaaatgctctgcaaaaagcgggtcttgcttcaaagtattcagaattgcaatgctgtgattctctgcatcttggtttgcgctgcctcactaggactaggggtatgctttccactggagagtgccacccatatcattttagagagggctgagggagaagtctactattgttttagtgaaacacactgctaagaaataagtagtagccaccaatacttccaatggtataaattctcataaatggtatttttttcagtgcctttgtatgaagcaagattcacaatggggcagagaatgaatctccccacaagctaccttgcaagtaatgggtgggtggaagtttcaggagcaggggttcttctgtttattatactctgctatttgataaatgcccagacatttacccattagttaccactaatggctttttcataaagacctcagtgatcgcctcctcccagactgagggtttccctgggggcaggaggtatctagcacagtgtaaagactgggtaactagggatgattcagcccagaaactcaagaagataactcattctgttttcacctgtgttggggggaaggccattgaaaataatggaagcccctctaaactgacagtgaatgatattagtaaaacctgacaaataatgggccagtgaaaagatggagaagttgtagcttaagctaaacagcccctccttctggctggatacagcagctaaaaacagagagaactgtgtgttttgcacaagaccgcttgctaactcaagacattttgcttctttccgtggtgaaaagacagggagggcaccatcacaaaaatctaagatgaaagagagtcgctcttttgcttgattctcacatccattcttccagcctgcaatgggcagggcatatggtcaggtggatccaggggccaggcactcgcacacaccaccagggctgtgatgcatgggcccaggtagaggtgccgtgggaggggtcattgagacagagagtgtgagctgggcagaggaaatcagacttgactttaggggttacagagcaacccaaggagacaaaatgctgctgaattcccaacagcctatcagggagggaatgttttctgtgactcatttaagtggcctcacttggtggattatattctgtcattggcccctccagcccttcccccttttaagaagaggatgtttgtaaattagaagcaacaggaacaagaaagtcatttgaagagcccgaggaggattaaacataagtattcgttatgtaatatttgtaattccctgcaatcagcctgttcctttccccatagggggcaaggagatcaggatctggtgaggtgtgaatcttgggaggtatgaggaagttgggctgagaaagtgaactttctcctggtctttcctgagggtgtgctcttagaggtctccccccttaaggggcaagggttagacaaatgacaatttctaagaggaccgaaaggattgtatacaccctgcctcgtgaactagacagcagatatcttattacttgcacttaacatggggcagcctagcgattgagtaactgggttgggttggcaacagctacccggcttcacttatgaataatagtaataataataaccgcagctaaagcaaccccattattagtagctgccatgtgtcagacactaggtgttttacataaacaatctgaattcatcctcacatttccctttgcaattgacattgcgacttccactttctaaatgaggaaacagatgagcggtcaaataactggatatgattctaattcatcctctgtctgattcaaaaatctctttttactgtgcatttaagtcaagcagaaaattggggaggtgtgctagaacctgagaaaagcaaaaatgaatttgaatgtgtggggggattactaatagcagacatgaaagctccaacctctcccctgaagaggcaggataaacgtcataatttttgcattcacagttaagttggacacattcctaaaaaacagcctgggttggaaggaagtggccagattgggaaggggctgttggagacggtcagggagaatggtggaagccattgtctgcctctcattccttgcttgcagagagcaaggcaccctgatgtatattagatcactctagatttttggttgcctgataaagacagtgagaggagataaaaggcatgtgaagtgttggaattatagtatcagtgctctctaataaatacctgatgtggcatgaaagtgcctcaagcacattcaaagcatcaattaaattaggtggagtgagagagggcagtggaacaattgcaggatgcgcctggccatctcctcccttggttggggcatccacacatccattctgtctagggtgtgaataacctcaagccctttccttttgatgtccctctgagcctgcactgctttgtgacagtcttaggcatgacaaagctctccttctgtagctgacataaatcagaatagcctcccccatgtgtatccttcacacttcctttatttcctaggctttatgatcaatgggctcccttctctgctgtgattatggctgaaagcttttgtttatccatgcacattcttaatcgatattagttcccaatcctcccaccctgtgatttatgcatttgcctgtcttctgtattgagtcctgaaggattggaatttgtgtaaatgtcatgtacaaggagaaggcacatttggtgctatctcaagttgcattacttttaaagcccccagaaccatcacattgagctgtggaaaatatgactctctgcccagaccaatggcaggcttcctgccatgaggcacacagagcccaaaggctcaggtgtagtaatactagtctgaaatgctcagtcacagggtgaccagaccattaaactgtaattaggttgttataattattgaaaaccaaacagcattataataatagaattgtgcctctcacattttatatctcgcccaggatcatattagtagcctattcagtatatgggcattgagtaatagctgctattcttcagaaggcatttacttctattaaaagtgctgggtgagcaatttgatgaaagcatggacattttcctagtggaaaatggacatttatatgacattgttcagagacctggaaattataaaggcctacttctttgaaaatcaaagtcctatttttaacctctaaaacacaaacaaaataaaatacgaacagttatcataaaatgttcttgttccttttttgaaatagaatgtattagagaaatgaatatgtaaatacccaagaagaaaccaaattctgtttccatgtaggtatgtataactggatgaataggcacttaggcaaatcagaactaggttacaggggtgttttcaggaatttatgattagattgtgatggtttttagtgcagctcttcctcatgttagcagatagcccacacgtgtgggaaagctgagtcgtcttattgaatctgacagtaaccgtttttgtccctttctttttcttttcagaactctctttgctcacaagttaccaaaaaaaaaagagccaacatgttggtattgctggctggtatctttgtggtccacatcgctactgttattatgctatttgttagcaccattgccaatgtgagtaatgttcttttgttcattcattcattgagaaatcattcgaatatttacatcaagtgcacaaaagaagtttaagccacagcccttgcccttcatgaacttacagctcagttgtgggaaaacaaaataaacacacgcttgcccttcaaacaattaaataacaggaggataaaagtgaatgtccacaggagtaatcctgccagagctgtaggtggttaagggctggaggatctagtgcagcttcttcggtctctagaagagccttcccagcagcaggggtgagtggagcttgaggtgaacctggaggagtggtagatggctgaggtttctcttagtgaaagagggaaggtggaaggatcatagggatgcattcaggtgggagtgctagcaaaggagcatatgtaggaaggacaagctttggtcagaggataaggaggacacacacctatgtggctggagccgaacttcccctccttctgagaagcttgattagaaggatagatgggaagaagaggatgccagactgacaaattcaaattttgagcaaagagtagcatgtgaaagtggagttttgcaagattaacccagtgccactgaattaactaactcagacaaaacgagaaaaaaaaaatggaggtagtgtcttttctctctgaaccctgggctactctgacctctagtggtggcttacagcgcccaatttgcttttacttgtgcttttctcagaaaaaagccagctccttggacctaaaaaccaaggccaccaatcactaggcaggcaaaccatggtttcagaatctgtttaggtccctatcacagttaaagtataagtgagttttaaagttcagatagaagagctttgcaaacattagtgggtgtgatcataagcaaggctaattaagaataactgtgataagacaacccccgcccacgtgacctccttgttttgtaatttagccattctatatgtcaactcctatatctatccagataaatctgataagcttcttcaaagtgtattaatgagcgccaaagcgctgcgtatctgtgaattaccagcccctaatataaggctaggcacacagttgtttattgaatgaagagcagggattggcgtaggtgatgcatgttcccggccccacctttccagtgtgtgcatttgtgtgtgtgtagacaggacactgcacttgttttctcttccagaaggataattccttttcttgggccaggcaggaagggatggcggcaccatgatcagtctgggggaatccattcaggtcacccttcagcttttagtagcccctacaggaaagcacttgctgtagtattttactatcaaattactttgcatgttgtgacagtcaagtttgatccttctgtttagatgaaagtggcttattaaccactagattcattgttattttcccagtaggtcttatgtttcttaattgtttccagttggacatttcacttttttcctggttaaccagggacttaaatgaaacaatcttgttagagtatatgaactgcacatacctaagccagtttcctcatcctggacttctgtttctcagaaccttagaattttaaaccactgtggttgagttacttccatttttgttaagtcgtgaagaatgtggagcccaaagagggctaggtgatttctttctgggtttcacattcttctgtgtctcttctcttggcaactttgtgaacttcagttttaatcggaccttatttccgcccacagataagctgcatagccatagttatagctaaatagaatgtctttattaaaatctgatcccgatgcaagctgatttgttattttatttttaaatcagagggccagctttcaattaacattttctttccttctggtttcaggtctggttggtttccaatacggtagatgcatcagtaggtctttggaaaaactgtaccaacattagctgcagtgacagcctgtcatatgccagtgaaggtatatataaagatattgacccagtgctgacaataggtgtggtcagggaatgttcagcccctggagtgacctcatgcccttgttctcctcgtcctgtgtctacagatgccctcaagacagtgcaggccttcatgattctctctatcatcttctgtgtcattgccctcctggtcttcgtgttccagctcttcaccatggagaagggaaaccggttcttcctctcaggggccaccacactggtgtgctgtgagtatctcatgggtagactccagtttacacttttaagtccatcttaccatgggtgtttctggcaacttgaacagattagcacatggttcagtgaaacttccttgtgcaattttctcctctggttatttgttctcttgtggagaaccttggattgctgcttaggttaagaaccctcatctgcttcattgttcaaaaccagtgctcctgggtagctaccaagtggcagtgcatatctgttagtagcacgtgtgtacaagacacttcaagaaggcagaaaggtaggagttctcagaaagatgaaaccactgccacaatgcacatcattattgtgattctcacttaattgttgttctttcccaatatactcggtttggtggaaggacatgctcttttgcatccctgagtagctttcctagacccacaagggccagacaggacagctgggtggtaggcatgaggttctgtgttttacatcacagcgtggccacacaaaccagtgcagacatgagagcccagacacctctaatttatcaacataccgtcgagcttggcccaggggacatccatcagaactcctgtttagggacaaacaagcagaattcattttcctattgctaatgagggaaataggatcttcttaaaattagtaaaactttttctcgactttaatgtaagaaaacacaccgacaaatctccttttcccctgcagggctgtgcattcttgtgggggtgtccatctacactagtcattatgcgaatcgtgatggaacgcagtatcaccacggctattcctacatcctgggctggatctgcttctgcttcagcttcatcatcggcgttctctatctggtcctgagaaagaaataaggccggacgagttcatggggatctggggggtggggaggaggaagccgttgaatctgggagggaagtggaggttgctgtacaggaaaaaccgagataggggaggggggagggggaagcaaaggggggaggtcaaatcccaaaccattactgaggggattctctactgccaagcccctgccctggggagaaagtagttggctagtactttgatgctcccttgatggggtccagagagcctccctgcagccaccagacttggcctccagctgttcttagtgacacacactgtctggggccccatcagctgccacaacaccagccccacttctgggtcatgcactgaggtccacagacctactgcactgagttaaaatagcggtacaagttctggcaagagcagatactgtctttgtgctgaatacgctaagcctggaagccatcctgcccttctgacccaaagcaaaacatcacattccagtctgaagtgcctactggggggctttggcctgtgagccattgtccctctttggaacagatatttagctctgtggaattcagtgacaaaatgggaggaggaaagagagtttgtaaggtcatgctggtgggttagctaaaccaagaaggagaccttttcacaatggaaaacctgggggatggtcagagcccagtcgagacctcacacacggctgtccctcatggagacctcatgccatggtctttgctaggcctcttgctgaaagccaaggcagctcttctggagtttctctaaagtcactagtgaacaattcggtggtaaaagtaccacacaaactatgggatccaaggggcagtcttgcaacagtgccatgttagggttatgtttttaggattcccctcaatgcagtcagtgtttcttttaagtatacaacaggagagagatggacatggctcattgtagcacaatcctattactcttcctctaacatttttgaggaagttttgtctaattatcaatattgaggatcagggctcctaggctcagtggtagctctggcttagacaccacctggagtgatcacctcttggggaccctgcctatcccacttcacaggtgaggcatggcaattctggaagctgattaaaacacacataaaccaaaaccaaacaacaggcccttgggtgaaaggtgctatataattgtgaagtattaagcctaccgtatttcagccatgataagaacagagtgcctgcattcccaggaaaatacgaaaatcccatgagataaataaaaatataggtgatgggcagatcttttctttaaaataaaaaagcaaaaactcttgtggtacctagtcagatggtagacgagctgtctgctgccgcaggagcacctctatacaggacttagaagtagtatgttattcctggttaagcaggcattgctttgccctggagcagctattttaagccatctcagattctgtctaaaggggttttttgggaagacgttttctttatcgccctgagaagatctaccccagggagaatctgagacatcttgcctacttttctttattagctttctcctcatccatttcttttatacctttcctttttggggagttgttatgccatgatttttggtatttatgtaaaaggattattactaattctatttctctatgtttattctagttaaggaaatgttgagggcaagccaccaaattacctaggctgaggttagagagattggccagcaaaaactgtgggaagatgaactttgtcattatgatttcattatcacatgattatagaaggctgtcttagtgcaaaaaacatacttacatttcagacatatccaaagggaatactcacattttgttaagaagttgaactatgactggagtaaaccatgtattcccttatcttttactttttttctgtgacatttatgtctcatgtaatttgcattactctggtggattgttctagtactgtattgggcttcttcgttaatagattatttcatatactataattgtaaatattttgatacaaatgtttataactctagggatataaaaacagattctgattcccttc

SEQ ID NO: 99 - DNA, 19338 bp, Homo sapiens
gctgcctggatgtatgttggggatatatgtataattttccctgtggctgtggccacagacccatcaccacaagaggggttggtccacagatcccgatgctggcttggagttattcttattccctacccttttcacagaattgtctttgccaaagtccattaatataccttgattggattttgcttttttttttaatttttttttgctttacagatcttcatagtttcctgcccatatctctaaaagtcattttgcttgagttgatatcctacagttcttacaagacctttctctcccagggtcacacaactctcgccaatattaaattaatatcagcttcaatcacgggtctctccatgggtttcacgggctatttgctcgcagagtccagggacattttcctcatccattccatcagatccccaattgctttctctggcaacacactcctagtatttgtacggtaaagctgcctaaaaaaattaagtaattcaaactactcttgaccttactttacaccaccagggcaattagagtcacagtctgggtgtgtctgaggacagcaggccgccaaatcccagtgatttagagaaaaccgagcagaatttcccatgcctcctgcctcattgtcccccagcagaaggttccgtcaccccaggtgccctctagggtggaccacttccgagttcatccactgtcaggaaaaggcacatggcatgcaaccgcaagaccgatgactagatgtcagagctggctcccggttgggatatgagtgactttgtggaggatggcgcctaaatgaggcatgccaatttctgcaccagggtgacgaacataagggctccttaaaggctagcccaatgtatctgtatttccttggggattaaaacccatgatcttcagttcctcagagaactgaaagttgcaaggagaaatccagtaattcctgttatctgcaggctttataagtcagtggagcctgcggaagtggccagaatccagcactccaagcactgctgtcttctcacagagtcttgaagccagagcagcgccaggatgtcacgggagctggccccactgctgcttctcctcctctccatccacagcgccctggccatgaggatctgctccttcaacgtcaggtcctttggggaaagcaagcaggaagacaagaatgccatggatgtcattgtgaaggtgagcccctttcctgggaggaggatcccagacacccctcacaccctctctcctgtctgcagactttaagagactcaaggaacttaaagttggcccttagggggaatgtagaagctggcttggaacaataaccacttcaactctctgtacctcctgccgtcatcttaaaacaggggtgataacaatggttccctccagggttgctggggggactacaggagttggcaaatggaaagctcttaatgtagtatctggctcattatacgttccagataagggttagccattatgatttttattgctatttattgaatgcctgtatcaggcactataagcacatggtttcacttcataatctttatgaagagggactattactccccatgtagaggtgatgaacaaagaaagatgaagtaaccttatacagctactccttttcaccagcaaagcccagctcctttctctctctttccttttcttctttctttcttttctttctttctctctttctttctttctttttctttcttcctttttctttcttcctttttctttcttctttctgtcttttctttcttcttcctttctctttttctttgtttctttcttcctttcccttccttacttttttccttccttccttctctctcccatcctcatcatccctccctctctttgtctttctttcttcttctcctccttccttcctctctccctctcctctacttccccactccttccactttcgcttacgctttccttgggtgatatacccaatgtccggggacactgcttgctttctctggagtcaattgactccctttatcctacaggttaattaatttttgatgctggcaacttaaccctttcccaggactctggaaaggtacttattaccttaggaaacctgagacaccatggtgtggtaggggggccaggagccctgggtccagattccacctaccagacttgtgagcttgggaggccctgcccctccctgaaccaccagctcccctagtaaaatggcgaccacatccaaataccacctgtagcactggctggtgaagagaactcagggtgcctgaggcacccagcagagcctgcagcaaggtgggtattcatgagccagagccgctgctgttgctgtcactgggaaggaggattggagtgaggactggcaggctctgttcttccttggacgagcctctcagacccaggtggccctgccctttgggaggtaaccaaggccttctagatggtgttgtttagccaggatagcaatgccaagcctgtgggagccatgacaagattgttcaatgggaaaccctgacatgcaaggcaatgattttccccacttcacacatggcccgtggagcctgggtagccactgagttcccatctccttcctcactgatgaaacccggctgtctttttgttccttggtgagtccatcatgggggcttgaactctgcatctcccctgagcagctgtgtcctgcagagcatgtccgaagtccttgtcaaggctgcctcaccctccccatcctaccaagaggccatccccaaaacactgcaagagctaccctacagggcactcacagtcacccgagaatgccaggcattcagaataggattatccctagcgcccattgaccaagcacctcctataggtgctaatttttgtatttttagtagaggcgggtttcaccatgttggccaggctggtctcgaactcctgacctcaggtgatctgcccatcttggcctcccaaagtgctggtattacaggcgtaagccaccgtgcccggctgggactgtattttaacagttcaacatggtgggctttgtagtcacgcagacctaagttcaaatcctgactctaccacctatcctggctgtatgactttaagctagtcactcaaccactctgagcttggtttctgcctatgtttaatgggctaataagcatagttaccccacagggttgttgtaaggctcggagtaggtttgcagtaaatgtcagcttttataattattatcattataattatacctctttatttctaatccagtctgttatctttgcttactaagggcttaataaatatttattattattattgtaattattcaagcaaagccaagaggcaggatattgtggggaggtcatgagcaaggggctctgggcttgaattacataggttcaaattctgcctccgccattttctagtagggtgattgggagtgtaatttactcaactttctctgagtctcacgctcctctttaaaatgtacataacaaaagcacctacctacctcagggagtccttcatttagttcagagaagaaattattttaataagcactcagtgcaatacttaaaaacagtaagtgtccaataaaaggttttatttatctgtggtaaatgacctcaaacccctgggaattctctttcttgcaggtcatcaaacgctgtgacatcatactcgtgatggaaatcaaggacagcaacaacaggatctgccccatactgatggagaagctgaacaggtaacatggggaagggtgggccctctagggctcaaggtcaagtgcaagggcatctgaaaacccctgggaactgaaagtaatgtgagatcccgcacttgaccaccagttcacacagccagtgttgcccaggagtccagctcccttagccacggtcctgagaactttcaaccagttgattttactgtgataaaatagaataggggaaatagatgaggggtctggacacagaaagaaatgaaaaaagcagatgaggctgagctaaaaagtacagttatgaagaaaatgttggagaaaagagaaaagattagaaaccaatagtagaagaaagataataaaattacaacatgctcacacacaggaatattatgcagctgttaaaagtcatgctggtggccaggtgtggtggcacgtgcctatagtctcacctacctgggaggctgaggtgggaggatcgcttgagcccatgaggtttaggctatagtgagccatgatcacaccactgcactccagcctgggccacagagcaagaccctatctcttaaaaaaaaaatcatgcttgctacagaataagttagagctaaatattccagcacggaataatggccacaatatattgaaaaaaagcaagttgagaattgcaggtaaaatagcccatttgagtcatcatgttacatgaataagggtgtgtttgtgtttccatgtgcatagagatgaaagactggaaggatgctctccaaactattaatagtggttacttctggtggggggggggggggtgtgatcagagagctgtggtgaaaggggttagtgaaggagtgaggggcacttgcttcttattttagtactttttaaatctgagactctgttgcccaggctggtatgcagcagcaagatctcggctcactgcaacctttgcctcctgggttcaagtgattctcctgcctcagcctcccaagtagctgggattacagtcacacacccactatgcctagctaatttttgtatttttagtggagtcggggttttgctatgttgcccaggctggccttaaattcctgacctcaagtgatctgcccctctcagcctcccaaagtgctgggattacaggtgtgagccgctgcacctggccatctcagcaagaaacacttaatagggacttttgaacaaaagccatgtctgggtcttgggcaggagcaagatgagatggtagatcctggtgccatcatcccccaggctctgggcttatccatcatagggaaggcatgtgtaggacaattgtagggacaggcaagaatccatgtcagtctgcctaagggcttcccttatagtaagggaactgagtgggggacctgcctgagttacccagccaggaagtggccaagcctacctttgaacttgcgtcacatctgatctcatagccagtgctctattctttgtcatctcagccttccttggagtgtccccagtcaggtttatgggagactgaggggacaggtttgtgggggactgaggggacaggtaggctccagtcatctcctccacagtcagtctggggcgagtcttttcaccaccagtggtcttggcacaccccaacctatctagactgtcgcggactccaagcagagccaagcctgtttgtctctttatcccccacaagccaggatgggccttagtcactttgcaactgagtcaccacaagcagtttgctaactcaggacttggcaggctatgttcaaaatagggccagtctccccaaagtggaagcccggcagaacctactgttcacactcctggggccccaggggctaagtctgccttagcatactgcatctgaagtcccaggaatttctgtaaggtctaagttggcccctaaataccccttctgctttttttccaactgaatctgagaatatgctgcagctttagacatgccctagatctttttgtgagcagatagagtgaaattatgttaggctctgcccagagtggagttatcagcaggtttggtaaacacacagaaagagtccgctttccctggtgcaggtgaggggcaaggtcaatgggacttcatggctgtatccccagcacccaggatataaacaacagtgaattgaaatcgtggtcccaaagcttgtaaaaaaatgcctgatggctttcagaggagagaatattcctgcttatcataaatgctcaggagtggttcgtggacacggacaggtggcctgatgacatttattccaccagaaagcatgagctgcagctgcagccatgggcatgagcggggtcaggggctgattctggccaagattgtcttctagggtctcagtggcctcccacaggtacaggccaaagcatgcgggttttggggtgagttggatctaggttcaaatcccagctttgggcttgcaaaccatagaaagggggtaatgataacactctcctcataaggcaagaaataatggctgtaaagatcgtggcagatgccacattccagccaatcaatggtggctcctctcattggactcaaaggttatgatgaacagtggcccttccacatgatgccattgggcgtatggaggcagattggaaagaaaggaacatgtacagtaggggaatgtttactcttcaagatgcagtgttaaatctttgttttctagaaattcaaggagaggcataacgtacaactatgtgattagctctcggcttggaagaaacacatataaagaacaatatgcctttctctacaagtaagtatcacctatgctccctggaacatggccaccaataaatcgtgaattgaatcaaaatgcatgtcttttcttcaaaaccaaattttgatttctaaccaattctcagtgttcatcaaaataattgctgtcaaaactaggggcctatgcaaagtattgactcttcaagctgaaaacacaaggggtctccaaacacctaatttgttggttggctccatggttggcaggccaggtgttctttactcctcatagtcaagtcctggcccagggctggaaagctgaggttctcagcacagctgattcctgaacttcgtattcttttcctcttcctgctagtaatttcttaagtctgaacattaacttttgggtgccacagataactagtatggctcagatcttcagctcccagattcgcaacagctccctggctgttgagaagagttgacttagccttgttctcaggaaaacgatcctgtgcttgagcctgctctggcttctgagaaagccatgggaacctacatctctgcttcatgaaagtagtaagaaaagggctgactcagctgggaggacttccttttccttcttatagggaaaagctggtgtctgtgaagaggagttatcactaccatgactatcaggatggagacgcagatgtgttttccagggagccctttgtggtctggttccaatctccccacactggtaagacccacacaggcctttctgtctgggacctccccaacggcccatgaatgcgcagcagccttgagcatgagcccattaaggaggcattaggctggatgtgacagtgcattgcttctaatacttcaatgtagacgatgcagttcagtgtgatggcaccaggcttgcttctcagaatgccatgactcaagacttccccagcccagaacccactttctggaagcaatggtagtccactctctttggagagtttaggctcatggaaattgttttctgcaattccttggtacctgtcaagtacaactcttccttcctttttaaaaatcctggctgggtgcggtggcgcatggctgtaatcccagcactttgggaggctgaggcaggtggatcacctgaggtcaggaacttgagaccagactggccaacatggtgaaaccccgtctctactaaaaatacaaaaattagctgggcatggtggtgcgcacctgtaatcccagctactcgggaggctgaggtaggagaatcacttgaaccagggaggcagaggttgcagtgagccgagatcgtaccactgcactccagcttgggcgatagagtgagactcttgtctcaaaaaaaaaaaaaaaatcctaagcaatggcttaggtgaacccctagcctagaggctcactctccctccagtcactgcatcgcagactcctccacaggccgcagcgggtgaggaaatccaaatggattgctccctgaactctaacaacagtacttgtactggcccctgattaagtgccagcctcctgtaatccttgcaatgactacaaggtagggagtaggattatctccactttacatttcaggaaactgaggtttaaaaaggcatggagtcacccagctactgaaatggacaggccagggttgtaacccaggccaccacctcaggagctcatgttcttttttttttcttctgtttttgagatagggccttgctctgtcatccagtctggaatgcagtggcatgatcttggctcactgcaacctccacctcctgggctcaagcaatcttcgcacctcagcctcgcaagtagctcagactataggcatgcaccaccacactcagctaattttaaaatttttaaatagcgagataggtctcgctatgttgcctaggctgttcttgaacccctgagctcaagccatctgcctgccttggcttcccaaagtgctgggattacaggtgtaagccactgtgcccagccagtggttaacatgcagtgttatgcaatgctcgatggagtcaagaatcaaatattttttcagtacctactatgtaccaggctctgttgagggcactggacaagacagaggaggtgacattgggctgtgacctgaagaagtcagccatacagagggctggagaaagggcattccacatggagggcacagtgagcacaaaagctcagaagtgggaaggaagctggaatatttagggggaccaaaaagaggatggaggagtgcagtggaggcctgaggaggagagctggcaatgaggacacgtggggccctggatgcagcctgctgggctgagttctggctcctctctgtgtgacttgagcagtgaccgccccacagcccgtgtctgttgaggtaagagtgggaatccaggctgagaatgaggggaagtcccaggaggagctgctcagaaggcgacagctgctgttagcaggtgggccaggaacggcttctgaggctcgcgcacattgccacactcaggctctcagtcctccaacggtgggggaaggttttcagacacttcacaaaagtctttcgtgaagaccatgctaatttttaaatagctttttggaacttttgttcttaattacaaaggagtataaactgacaagcctcatttttttttttttagacagagtttcactcttcttgcccaggctggagtgcagtggcgtgatctaggctcaccacaacctctgcctcccaagttcaaacgattctcctgcctcagtctcccaagtagctgggattacaggcatgcgccaccacccccagctaattttgtatttttagtagagacaggttttctccatgatggtcaggctgatctggaactcccgacctcaggtgatccatcagcctcagcctcccaaagtggtgggattacagaagtaagccaacacgcctggccaatttttttttaactagaaaatgtgcgactgggctcggtggctcatgcctgtaatcccagcactttgggaggctgagatgggtcagtttatactctttttgtaactcccagctgggtgtggtggctcacacctgtaatcccagcactttgggaggctgagatgggtggatcacctgaggttgggagtttgagagcagcctgaccaacatggagaaatcctgtctctaccaaaaaaaaaaaaaaaaaaaaaaaaacaaagctagccaggcatgatggtgcatgcctgtaatcccagttacttgggaggctgaggcaggagaatcacttgaacctgggaggcagaggttgcagtgagccgaaattgtgccattgcactccagcctgggcaacaagaacgaaactccgtctcaaaaaaaaaaaaaggaaacctttaaaaaaaagaagaaaatacaaccataaatatatgcaatttttcctgtcaattaaaaaaagaaagaagagggataaaatacatcagaaacaaaagaaaatacagatttgccacacacacaaaaaggggaaaataaaagcactcacaatgccagcatggaacacagttgttataagtaaaatgtttatttagaaacagaatgcttgttccctggtactgcaaggaaaaatcaacattcagataaaaagttttctcagcaagccaattttactttctgcagaaagggtgctccttgcagatggaacaatggcgagagcacacctgaataaaggagggaagcaatttttatcctttactcagcttgtccctgctactgtgtcctgtctctctattggctggagccagaccacacaatctaagctaacccgactggctaataatttaaacctttcttaaataggtaaaggcaagggagaacaaaggaaaagaggaagttgcttatgccaaatagggaaggggcaaaggctgtgagctggaatgtgcctgcgagctggaatgtccagcacaaatatcttggttaaggtacaaggacatagaatgtactatgtgcctgtgagcatgtctaacagctacataggatagagcttaacaaagagttattagcacaaagcaaggagacttgaaggaagttagtctttaaaggaaactattatttctaacacttatgatttattctttaataagaagggaaactttgaagaggaaacttttttactttctacaacagtctaccagctttctcttagccatgaagggcaactgggagaaatgagtctttcgtgtactaaaaataggcagcctaatgaccccaagatcattaaaatctcggccactggctggaccctctgggaactggggacccagataatgcagcctgtgccttctggaggggacagctggtttccctccagcagtgtttatgagaccttgacaggggaagtgtgtgacccccgcctctttcctgtttctcagctgtcaaagacttcgtgattatccccctgcacaccaccccagagacatccgttaaggagatcgatgagttggttgaggtctacacggacgtgaaacaccgctggaaggcggaggtgaggactgctgtgtcagacgaattcccatctagcaggggcaggctctggtccctgagtgggatgagtacctctccagggagggggaggaggaagggcatgtgcaggctaccaccacttacagcattctttaaggcctttcttcagccctaagtatcccttttgctaaatctgcctgggtaccctgcatgtgggccttgggaattgccacactttcccattaataacagatgccaacatttactgagtgaatagctagtgccaggcactgtgctgagacttgacatggacaagtttatttaatcctcccaataatcccttgaggtagctacagtacctttctcattcccactttgcaattgagaagtgtaaggcatagagcagtcaggattgtttcagttgcaagggacagaatcttaacatggctcatgaaaaaaaggagcaattgattggtttgtgtaactgaaatgtccaggagtacttcaggcatagctggatccagggctcagacaaggtaatcagagcttgatttgtctcttcctttctatctcctggttgccctttcctctgtgtggctccattctcaggttggttccatccctgggatggcaggacagccaccagcagcctccagaccaaaataaattttctttcccacaaggcaacaaatagtgtgggactgagtctcattggctctgactgggtcaggtgtccatccctgaaccaatcattgtgatcagggtgttgagctactctgattgactaaatctgtgtccaccccagctccaccccaaactcagtttgaggtggaggagggatgggtggtctcccaaaggaacttggggtgctgttttcacagaagggggcacatatttgccatccctataggctcagttctttccacttttggaagagaccacttgtggctgtgaggggctgtgaaagctcttggtaaatatggaagtgcacccaagggttcttcttctgtatttctcttttctcgtttcggaatgtgactcctgtgatcccccttcctcctcttgagttctgctgctcaaatgcaaaatgaatcaaataaagtgtgaacatagtccatcagagctggggcatggaaaagaccaggggtgtatttcattgcttattaataaataggtcaaaagaaagattcattctttccaaaaattatgaaatcattcacttattaaacaagaatgtattgagcatctattgagtgttgggctgtggggaggcatcagtggcctaaaagtgaacaagaggggaaactgcttcagtgaagcagactgggatgtgattctttttttttttttttcttgagatgaaatctcgctcttgtccccaggctggagtgcaatggtgcaatctcggctcactgcaacctccacctcccgggttcaagtgattctcctgcctcccgagtagctgggattacaggcatgtgccaccacgcctggctaatttttatatttttaatagaaatggggtttcaccatgttggccaggctggtcttgaatgcctgacctcaggtgatccacccgcctcggcttcccaaagtgctgggattacaggcgtgagccacggcgcctggctgggatgtgattcttgacttcaccatttgaacctcccagtcctgtggcctagagcaggtcacttaatctctcaatcctgtttctatagaagttagtgggctcttgtacctcctattgtttattgctgccaggtgtaaatttaaaaacacctagtgctaggcctggcacatagtgaatgttcagcaaatcatgtctatattagcagaagctggtgatcactgaggttaaggatgacactctgtcctcaactgaacccatcaatcatggggaaaattgtgatcaccaaggtcaaaataaaatgttcttgaagaaaactctgaagtcagcaatgccccaccaaacaatagcacaaacaaggaaatctggcacttcctctggattgtggaatgttgaaaattctgttccaagagccttgcagggaaaaatatttccaagataggaagtttctcttggtggccttgggtgggggtggacagctcactcaatggtcccctcccctgaagatgcctcccacctcctcaagggactgaattttcacagaaataagtttccaacttcaaaacaataggagagaaagagtgatgccagggttgtcaatacaccacccaaattcacttttcctgcttgaaagcaaaaggcgttgattcattcgtatatttacaccctacagtagtttgagccagggacaaaagatgtgagggaatagattcactgaaattttttttatccacacctgactctgcatgctgaattatggaaatgtggcgactaagaacagcaaacattctccttcctgttaagaacatcctccctggtacgcactcgcctgtcatcgactcatcaaaactgtgactcaattttaaacaacaaaaagaaatttttaaagaccttatattcatttgctagagctgccataacaaagtaccatactgaagactgggaagtttaaacaatagaaagtgagttcgtcaccgttctggaggctggagtcccagaacaaggtgtgccagcagggctggtgtcttttgggggcctctctccttggtttgtagacggccatcttcttccagtgtctttacatggtctttgctccacttttctgtgtcctaatttcccctttttacaagaacgccagtcatattggattagagcccatccatatgacctcattttaccttaattccctcttgaaaggttctatctccaaatacagtcgcattctaaggtgctgggggttagaacttcaacataggaatttggccggggcgggagcagggggtagacaagattcagcccataacagaccctgttgtttactgggcctgggacgcagagtctttgctagagtccagtgtgaaagcattctgcagcagcacccaccaggtgacagttccaaatcttgtcttttagaatttcattttcatgggtgacttcaatgccggctgcagctacgtccccaagaaggcctggaagaacatccgcttgaggactgaccccaggtttgtttggctgatcggggaccaagaggacaccacggtgaagaagagcaccaactgtgcatatgacaggtaggaggccctgcagggtgctgctggctcaccacagtgcttggtgtgcactaggaaagacgcaaggtggctgggcactgtggctcacgccagtagtcctagcactttgggaggcctcgatggatggatcgcttgagtacaggagtttgagaccagcctgggcaacatgatgaaaccccgtctctacaaaaaatacaaaaattagccaggcatggtggcacacacctatactcccagctactcaggaggctgaggtgggaggatcgcttgagcccagaaggtggaggctgcagtgagccaggatcgcaccactgcactccagcctgggtaacagagtgagactttgtctcaaaaataaaaaataaaaataaaaataagaaaagcacactgcttgcagagctgagtcaattaaatgtcaggcccctctactgggtaccacatgtagcgtatgaaccacaggaccctatgcggtggccctgggcactgtagcttagcagaggtaagcactggcttcgctatcagataggcctggatttaaatcctgacattatcacttcatatgtctgtgaccaagagacaagctctctgtgtctttcatttcctcccctgtaaaatggaagttatcctagtgcctcactcatgaagatccgatgtggagtaaatgaaataacatgtcaggctgctagcacaatgcctggcatacggcaagtgctcattacattcatgggctgatcattgttccatcacaaagacttaccgcaattgatgcgcccaatccccatcattaggcattgggttattaccaagggtttgctgttataaatactgctaaaatcaatatcctctgtgcattttgtgcaagtatttatgatttcctcaggaagcaaccctaaaaatgagaccaattagtgcaacggtatttatatttttaaagctttagctacatattcctaaatgcaatgcatacatttaagtcctagcattccctcgtgctttttaaagtcccttcagggattttcaaacagctttcatctttgctccttcaatggggacagaggggggagtgcctgaggcgtgtgaatgttagtgatcttccatcacagagaccacaggtggggaaacccctaggagcctggtcccaggtggtggccacagttcccagagctcagcctgccacgaggaagtgtgagatggccatctgcatgagagccaccaggccactcgttttcacttcctctcggagttttttttttttttttttttttttttagacagagtctcgctctgttgcccaggctggagtgcagtggtgcgatctcggctcactgcaagctccgcctcccgggttcacgccattctcctgcctcagcctcccgagtagctgggactacaggcgcccgccaccacgcctggctaatttttttttttttttgtatttttagtagagacagggtttcaccatgttacccaggatggtcttgatttcttgacctcgtgatccgcccgcctcggcctcccaaagtgctgggattacaggcgtgagccaccatgcccggcctgttcctcttggagcttttgaggctggtgtttcctttgcagaagttatcactctgcaaagtgggaacccaaggcggggagttacaggggtctaagtgcccagaccccctattttgaaggacttccagcaaagcctggacgatggccactcactcagttacacatggcagttgtgtgcccgtgggtaggtcaagtcccttctccagcgccattcttctcccctggcaaatgagtgggaagtgattgaaaatgatacagaagaatcagaaggcaacatggccacagtagatcaggtcaggggtagaacaggttagaaaaagatgtttactaaaaggatcctgattttatacacatgtatcccaaaggatggtgggattacatgtgacattttaaagattcatttcttattttgatgctctgaattttgtttctcataacaacatgtataactcttgtgcctcttttttttcttttttttgagacagagtcctgctctgtcgcccaggctggagtgcagtggcaggatcttggctcactgcaacctccgcctcccgggttcaagcgattttcctgcctcagcctcccaagtagctgggattacaggcatacacaaacatgccccgcttttttttttttttttttttttttttgtaattttagtagagatggggtttcgccatgttggccaggctggtcttgaactcgtgacctcaggtgatccgcctgctttggcctcccaaagtgcttggattacaggtgtgagccaccatgcccggcctcttgtggcttttaaaaagtcataggccagttgtggtggcatatgctgtaatcccagctacttgggaggctgaggcaggaggatcacttgagcccaggagttcaaggctttagagcaacatgatcacatgcctgtgaatagccacggcactccagcctggacaacatagtgagacctgtctcaatacaataaaataaaaagtaaaattaaataaaataaacggagaaaatgaaaagccataaaaatgatgttttaaaaatgtaattagacaagatggtctcagttccagtctttgttccatgttcacatatttatcaaacacctctcatgtgctgagtgctgggggaacatgcaaagatgcccaggatctggctggtgccctggactgaaaacgtcacatgaacactggcctggtcctgcacatccctagaagaagtcagaaatggaagagcctttaacatgtcattctttgctttctgagtcttaaagaaagctttcacaaatgtctaacttgatgcgaagaatttacatttgggttgaattaaaagccgtagcccgggccgggcgtggtggctcacacctgtaatcccagcactttgggaggctgcggccggtggatcacgaggtcaggagatcgagaccatcctggctaacacagtgaaaccccgtctctactaaaaaatacaaaaaaaattagccaggcgtggtgccgggcacctgtagtcccagctactcgggaggctgaggcaggagaatggcatgaacccaggaggcagagcttgcagtgagccgagattgcgccactgcactctagcctgggtgacacagagagactccgtctcaaaaaaagaaaaaaaaaagccgtagccctggagcggtggcttacaccggtaatcccagcactttgggaggttgaggtgggcggatcacctaaggtcacgagttcaagaccagcctggccaacagggataaaccccgtctctactaaaaatacaaaaattagccaggcgtggtggcacacacctataattccagctacttgggaggctgaggcaggagaatcgcttcaacccggaaggtggaggttgcagtgagctgagatggcgcactgcactccaacctgggtgacagagcatgactgtgtctcaaaaaaaaaaaaaaaaaaaaaaaagttagttgtgctggtgatgttagcaaatgcagataccaaaactgttgattagaatggggaaggcccactggtcactcatgaaatggcagtttgactcaccttgccattcctcgggaagtcactcaggaccacgtagaccacaactgcatcacccaacttgggatatgttagtttgtttccaaaactcatttgactacctcattcttactttttgtcattattgcaaagcacatatgctgtgatttttctcgatattttccattaaatcgcttaatttcttgctgaaataaatttttaaaagaaatttcatgatactagcatgagtaagaaagcagcagcatttgccataaattgaaggtaacgtaaaaattaagtccagtgaaaatcacgccttgttaaattctgccttaattctcttgcctgcagaatgctcggagatggcagcctactctctgtcaacacgggactgagggaggtattaaagacaaaccagcacctccctgagaatttctccataatcaaatcagggaaagtgaaaaataattgaaaaaggaacagcgttctcagtacgcaagtcattgttgtgtgggatagtgtgcgtgtgtcatataaaatcttctcctactccaccagaacattgcccacactgggagacagtgtcctggtgtccacagaaccatggcagggactgatcctatttcacagttgtaggcactgtcctttggggtcacaggctaaaaccagctctggactttgagcgccacatgaaagggccagactgctcggttaattccagacagcaaacacagaccttggtttgatctcagcaatcacaggttggattaacacaactgttttccctccccttgttccaggattgtgcttagaggacaagaaatcgtcagttctgttgttcccaagtcaaacagtgtttttgacttccagaaagcttacaagctgactgaagaggaggtaaggttgccatcttgtctttctatgccattgtcctggaaagatgagttagcttgggcaacatgatgagactccatctctatgaaaaattcaaaaaaattagctgggcatggtgatgcatgcctatggtcccagctacttgggaggctgaggtgggaggatcacttgagtccaggaagcggaggttgcagtgagccaagatcgcaccactgcactccaggctgggcaacagagtgagatcctgtctcaaaaaaaaaaaaaaaaaaagatgggttgatgccaccctttgaggtcaccactgaagacacaacattgggcactagaccttgaccctcaatgcctatgattctgtgatttgaggcccctccaaaatttctgatcgagctggtcttggaatgacgcttaccagtaagtgttctgtggggtgacttcgggcatttcctctcccctccctggtcctaaatttgctcatcgctaaaatgaaagcatctcccaggcatctcctaatttccatgtctacctcccctttctccttataggccctggatgtcagcgaccactttccagttgaatttaaactacagtcttcaagggccttcaccaacagcaaaaaatctgtcactctaaggaagaaaacaaagagcaaacgctcctagacccaagggtctcatcttattaaccatttcttgcctctaaataaaatgtctctaacagatat

SEQ ID NO: 100 - DNA, 13989 bp, Homo sapiens
aaacataaatagctatagaatagtaccatgaaagaccaaggccttatttggaagaagtgaggagaagtaatcaaggaagaccttttgcagcagacagcttgtgccagacatttgagggtagaatggaatgtcttaggtaaagatttggagtaaggacatttcgtacagggcagagtgaacaaattctctgatcaccgcaaaaggtaaggcaaactgacaaattgatccctttttaattttgtttttaattaacagaactaaacctaacggaaagaatgtgttgccggagaagaacgaattgatggccttttattaccacaggaaaaagtaaatgtatctgggcagcccctcaagtctcagcaaaaggaacgtacagttcctgccatgtgccggtctcttctgaagaaaagggggcggtgggggtgggggcgcaggtctttaggttgtttattcctttctctctgtccagtggcagagaagcccatacttttgaacgcagcttgttggctactgtaaaagccctgctctgagcaaggaccaatgagcacgcggagtccaaactcttggaaacagtttgtggccaggagtacttgacattgagacagcctccgagttgtaaacaagggcgagcctgggcgggaccccagcccacgcgactcggagccccgtcccaagaggctaatcttaagcccacgttgccccagatacctgtttctgcttcctcttccctgttcttcccaccctttttccgtcacagccgcgggcaccggtgccagggcactccgtggtcaccgtgccaggccattctgtgatgaccgcggctggaggggcggagcccatagttctttctctgatctgattggcgcgacctggagttcaggacgcgtttccaagttccagtgactcctcctgtttgggactcggggggagagtgcggggagacaaataaaacctcgggcggcggcggctggtgggaagacttgaacttgaatctcgaaccactgcatctccgactctgcccagactcttcactccgcggcaccctcaaaccccagcccaggccggggcgcacaagccagccagcgcacctgcagtcctcgcccggacgcgccgcgccccctcggaaccaggctctgctccgagcagccttcgcccctcaagccagccacagtccccgccaggccgggtgggcgtcaagatgaaggcggcccgcttcgtgctgcgcagcgctggctcgctcaacggcgccggcctggtgccccgagaggtggagcatttctcgcgctacagcccgtccccgctgtccatgaagcagctactggactttggtgagaggggacacagggcccaagctgggtcctagggttggggaactgccttaactttcagccttggtagagggagggctaggctcaagctaaaacaactggggttcactttgctgctgagccctggagcctcgacgccagcacacctttccttttcctagatttggttactttctgacaggggtgcctccaggtcaaggccacctgcaagcctgccgacgctggatggtttgacttcatctgcacactcttctttctgacccgctcttccagtcaaaatactttttgctttcggtcaccgtttaacaatggactggaaactttatcctctccttcacagcatagtactgcttggagaagtttctgaatagtattaaatagcctcaaattaacagattttattccttagccacctggcatccttccacagggtacatctctctgcattcctgacagatttctttgtctctttatcattatagttttccatatatttgcattgttgctgaaaatatttacacatttgttgcagtaatcttataaggaagatttcaagggtttaaatgtgatatcactactctggaaatatcacagctccccctccagcctcttatcccccaactccaattccatgtccccactcattaaaggatgttgtgttgttgacattgtggtgtgaccgaatcctgcagtcttttataaattctaagaactgtgggatattcttacttcttggaagtgaatcctcttcaaaaagagaagacaataattctcctatatctgtcactttttaaaagaaagaaggaaagacgaaaggacgaagggaattagtcaattaaggagacaatcgcccctgaattatcgattaacagtaacccaactgagagtgaaatataattttataatatatgtgtgttcaatatttgatagttaatgctatttagatatatcatttagacacactttttctcaaaactaaattgatttcatttattataggttcagaaaatgcatgtgaaagaacttcttttgcatttttgcgacaagaattgcctgtgagactcgccaacattctgaaggaaattgatatcctcccgacccaattagtaaatacctcttcagtgcaattggttaaaagctggtaagtggtgaaccatattgaagtctctagttttgaaacagttacccgggtatgaattcttatactatgttaacatcataattggaaaacaggtgatctgaatggtaactacttttgaaagatgtaagaattttaaaattaatttagggtaagttatcattagagaagttataaaactataaacagacatttttaccctgaaaaagtagattactttataataaaattttgagttctaggaaaaatttgaaaaaaattggcatgcaattttaattttcaattatagaagagcactttcaataataaaagagtttgatattgcaaaagaaatcctatgcctagaaaccaattcacatgactgctatttagggaaggcctaatctttgtaacttacaaagtgattgacagagtgggctctgggttcaaatcctgcctctgtcacttctagttgtggaatccttggcaagtgtcttaaactctttatgccattgagttattattcccatctgttattaaagagattaaagtatatgcctcagagggatgtttgagtgtaatgaaatgagataatccataaaaaagaaaaaaaaaaccacttaggacagcacttggcacacagccagcagtcagtaagtgtcagttgttgtcatctcattttataaatgaagatactgatgcttagagaaggtaggtaacccaaaacagcaaatttttgggtcacagaagcaggatatgcacaggtagcagacatgcatgagacccttatcttaatccactgactgcacagccttttgttcattgattcaagaaatacatgtattatatacctataagacaattacaatctaaaacatatattcaatctgtagtatttactattgcagtcaagacttacactcttctatgaatgaatgtagtagaaaaaaaataaaaagctttaaaaaaagttgtttctaagtattattgctagaagaaatgaaaatatttgccaaacaaaacagtcaggaaactgaatactgacctgaaatagttaaagaaacattttgcgttaaattttaagtttgaaagtcaaggattaaaagttatagcattttaaatttatattattttccaaatgttctggaggaaagttttaagtttgaacataatgcttactttctcttttcaaattatttgaaaaagctattctattttcagccatttgtatctgactattaattttaaaacttaaagcatacctgtttctttacaggtatatacagagcctgatggatttggtggaattccatgagaaaagcccagatgaccagaaagcattatcagagtaagctctatgcattagaataagtgtttaaaactttggttctttccagatagattcctaagatatttttagacctaaattaaaggaattcagctctgaataataaatcactaccctcttacacatgacaagttttggcttgttggtttttcagaagcgaagaaatatggcattgaaaatgatgctgagtgtgaagaaatgtagaggactcatttttgatcccccagggagacctatttttactataaatttactccaataatgagatgtgtaggaggatttaccattacatagttttaatacatttcagcgtcattggagactaaacattttctttcagagtaactgatagtttctagctacctaaataaggatcttttctaaatctgacaagaaattttgaaagttttttcacaatggcattctagagtcatctctagaatgatgatattagatattaatcattattttataaagagaagacttaatgaatacatctgatgaatgcattggttataaggctaatagttttacatataagctagaaacaaaatgagtctgtttgtgaaattatctcctctactctagtggaagaatctgtagtgagattactaataaaggactaatgttttatcatttgatttgttcagatgggtaatgcaaaaaaaactttagccttctgtgaagtaaccttaggagtataagtgaatgaaacgtatttgaacttttactaaccataaatattgtggcttagctttgtagatacactcatcaaagttcgaaatagacaccataatgtagtccctacaatggcacaaggaatcatagagtataaagatgcctgtacagttgacccagtcaccaatcaaaatcttcaatatttcttggatcgattttacatgaaccgtatttctactcggatgctgatgaaccagcacagtaagttagctcatcatgatcatggtatatagacatgggtgtagaatataagccatactataactagatgtctcactaatcagcgggtcacattctcagtgatagtactaatcattatcctgaattttataacaatttttttttgtttttatttttcaacagttcttatatttagtgactcacagacaggaaacccaagccacattggaagcattgatcctaactgtgatgtggtagcagtggtccaaggtatgttctgtatttctgcacttcccttattgaaaatgtacaatatatgattgacatatctataattgaggtgactctgtgaatgaatttatattcacagagtgttccatttattttataaatgttatcttcaaggtcctttgcttttgagagtcagtagtataaacattcctctaaaatattatttaaaaatccaaatataagtgactaacatgccatattttatatgttgtatttagtctctgaagtgcacatattgctaaaactgcaatgcaaacactgtcttaatttttcttcaataaaatattaaaatatatttttatatacataaacctgtaccttagtgaatattttagattagggtaatacagacactgaagattatttgagaactgtacttggcataaactcatttcattgttataaaaaacaacttctattccagatgcctttgagtgttcaaggatgctctgtgatcagtattatttatcatctccagaattaaagcttacacaagtgaatggtaagttataagtaaaatatattttaacctgtggaaaattctgtgttctcctaatattattgctttttgtaaatataaagcaacttctgtgttcattttttctcttgcctaaagtttgtacacattttttttgaagacaaggttctctttaactatctcaactggaaggctccaattctgcctattcagttgctaatgaggattcataaagaagaatgttttgaacaaataatatgggattaaagtagcaactatattccaatatcttagatcaaagaaagattacttcctatagaatatgagggataaagagaccagaagtagggaggatatagcagtggaaatatcctcttaaagaggttacccataagacctggagacaaaaatactttaaatttcactataagaaataagccagtgacagatgcatgattccacttatatgagatgtataaaatggtcacactcacagaagcagagtagaatggtagttgtcagaggctgtgaggaaggggaaaatggggagttgctatccaacagataacgaagtttcagttatgcaacatgaataaatcctagagttctgctgttcaacatagtgcttatagttaaggatattgtattgtacacttaacattttgttaaaagggtagatctcatgttaaatgtctccaccccaatacaaaaaaaattgcactattgttttatactactgttttggaagcagaacatacttcaaaaatcttcagctcagctgggttcagtggcatacacctgtaatcccagcattttgagaggctgaggtgggaggtttgcctgagcccaggagttcaagaccagcctgggcaataaagggagacactgtctctacaaaaaataaaaattagccaggcatggtggcacacacgtgtagtcccagctgctcaggaggctgaggtgagatgatcacttgagaccaggaagtcaaggctgcagtgagccatgattgtcccactgcactccagcccaagtgacagagtgagaccctgtctcagacaaacaaacaaacaaacaaaatttcaattctgacaaggtcttcccatactgtctgaatgactgaagtgactacatgatgaacgaaaggcactattttcaccccttcccattctgttctggtaaatagttgcatcttaaaacaaaacagtatacttaaattggaattaccttctcttttctatttaaagtaaacatctttctcaagtaatatttatacaggaacagtttttgtttatggtgacagttaaaatcaagttgctcaaagagtagcctaacagattagggacaagcaaatgtaaataaataccaaaagtagaagagcaaataaagaatggaacgtatctctgagcataaacagggttgttgcataatacttgtagataaactgctccaactgttggacaaaataaagaggggattgtgccagaccttgtgttttctgattcgaactttgccaaggcctggaacgctgaagaataatacttttatttttcttttctttctaattttattttactttttatttttctttccaaaaagcattaagaggtttttgtttgtctgtttcctttatcctcttggtaaaattttagcatatttaacatataagatttaatgtttgggtgatacaaaaaacaagaaaaatcaggtgtgttattttactaaatattaaaaatatgaaaattatagttagcattaatttcaatattatgctataagcacagttttctcccttctgtcttaaaatacataaaattttgactctgaaattgtgcagtacaaaaatgttgaaaatagaaataatccacaaaatctaatttatagcactgttcttccacacttacccaacttcacacatttgtggagaaatacaaaaattaatcatatggagcaaggtggttcatgcctatcatcccagcagtttgggaggctaaggctggaggatcgcttgaggccaggagtttaagactagcctggacaacatagtaagaccctatctctacaaaaaaaaaacaattaacaaaagagcattatgtagcaactacaacaacattttgaatataagccagtaatatttactgtttaagtggtaagtttctagggcaggatttggggatggggaaggtagagaatatgccaaccctcttgaagtctaaaatgttaatcacatgaatgtggtggtttattttagtgaagtatttgtttacaaattcttaatgaattttatttttctaggaaaatttccagaccaaccaattcacatcgtgtatgttccttctcacctccatcatatgctctttgaactatttaaggtatgatacttcacaataattgaaattttaccttttaaaaaggtttaacagttatatttttatctcctttattattcgccacaaaacagaagcctcaatatcttttcccaagaatgcttctagtcctcctaagagaaagaaactatacagtcaatgtttgacaaagtacatgtagctcattgtagcatcaacacatatttgagaatgcatcatacaattcatgatgtatcaatgctttacagccaagaggaagttcttattattttttcaggtgcccattaaagaactagtcatttattcattcattaagagaggtcatggggtgaatgtttcagtgaatgaggccttgttacctccacccccacaggctggtcctactcctaactcagcagttcaggtccagaattcctgtaggtggtatggctccattcagagtccagaatgtgctaagagcacagtcagtagttccttcaatcatctactttaaagtgcatatgaatcacctggggacttagttaaagtgaaaattttgattcaggaagtctagagtggggcctgagattctcaattttgaataagctaaggggtgatgctgctggtccacaatgcacactttgcctagcaggcctgtagagttgtgcttctcaaactgtaatatgcattagaatcgcctgcagggcatgttaaaacacagattcttgggctctaccccagagattttgattcttcaggtctgagaatgtgcatttctaacaagctctcaaaggatacagatgttactggtctgaggcagccaggtgctaagaatcaaatcctttcatgcgtcctaagattaagttaaattaagatcaaattgaacttaaaccaaaaaatagaaaaacaccttaagctttttgatgcttcccaagagtcccctgaattggagagaaggaagcctaaaaaagacaaatctgcctctaattctgacataactctttccagaacttcctgtttcctaacttattctaatgttactgctgtgaggtactgactgtactacaaacatctgatctactttatttcactacagctaatgactagaacttaatattatttaaaaaccagaaagcagaaagtagacaggtggtgagaaaggaaaatgggttaagaaaaccaagactgtatctgtatgagattcagccaatagacggaaaacatcttttagtttgttctgtgttaaaggacaaaggatactttttcattgatttgatttatttttaagttgaatgatacaactcatagagttattctgccatcattggtaaaagttagatgataatcaaatgcaaattgaaattcaatttagaattattgactgtccttttaaatagtaacaaccttttcacagcaagttttatgaaagccaataaattggttcaatgatttcactgttcatttgttatatagtagtctttggtgcttggatgtaaaacgtaatagaaagatagaaaagggagagctaggaaatggactataaaaaccaatttctacatttaaattaagcttacaaataagaacttgacagctagcagaattggtttccattagacattactcccaggagctatattacatagtaaatgaatatttttcattatacatcctacatgacccattcataaatggctatttacaaagctgttttactactaacttaaaaaaataggaactttgaattaccctctgtgctacttttattttaaacataaaaaaaaaaacatttattgtccctcattcctctgccattgaattccttatggtttgctttgttttagaatgcaatgcgggcaacagttgaacaccaggaaaatcagccttcccttacaccaatagaggttattgttgtcttgggaaaagaagaccttaccattaaggtaaccattctctgttttccttttgggtgtctcttgagagaattaaatagggtcaatagtaataaagctgtctgctttttgcaatagataacagtcatatatgccaggtgatttttaaatgaaggaaagccatttttatttagacaaatgcacattgtttttaatgtgtggctttgatgacttgtttgtttgttttagatttcagacagaggaggtggtgttcccctgagaattattgaccgcctctttagttatacatactccactgcaccaacgcctgtgatggataattcccggaatgctcctttggtaagaacaattatatggctaaattaatctcagccacctagttctaaatgtagagcaaggattgcaagggattatttagacaagttcatcaattaagtaaaattagacatgaaggatataagaatgaatgataaagcaagctaaaaatggtgaaacaagggatgtctgattggaagtagaagatatttatttaggttctaggacattagtatcagtgaggacagtaatttcctgcttgtttgtatttcagtgatcacatacacttctttacctgataacgtctctcttctctaggctggttttggttacggcttgccaatttctcgtctgtatgcaaagtactttcaaggagatctgaatctctactctttatcaggatatggaacagatgctatcatctacttaaaggtatcccttgaattcaatagcaaaatcctgtttctaaaaccattgctccttttatagccttgagtgctatggtctggagtgaattccccaaactgagttaatgcaaataatgactacaggtcattcattctcttctctttctgggtgtgtgtacattatttaatatgataacttaccaaagaggaagctgggccatactacctgcctcaagtgaagcaaaattgtttcctaagaaggttaatacattaccaaagtttcagaatgaggacatgttcatgtgaattttttaaggcaactccttttggcatctatgagagtagctgtgcttttattttacttagatttgtgggaaatatatgctaataatgttccagcctgaaaaaataacaggtatcaagatactcaagtccttaagctgaccttgttagaaatcctgggaaaggaaagctgactgttccaaagctgtcagtggggtgccagacattcactgtttgaacttaaaaacttggtgcatgttggctgggcacagtggctcacgcttgtaatcccagcactttgggaggccgaggcaggtggatcacaagttcagtggttctagaccagcctggccaacacagtgaaaccccgtctctactaaaaatacaaaaattagctgggtgtggtggcgggtgcctgtaaccccagctacttgggaggctgaggcaagagaattgcttgaacccgggaggcagaggttgcagtgagctgagatcgtgcccctgcactccagcttgggcaacagagctagactccgtctcaaaaaaaaaaaaaaaaaaccttggtgcatattttcctgtttctggtaaagcctcaatttctttgttaagatcactgtcttgattctgttcatttgctgactatttcaactgaaaatatagatattagcaactaaaacattaaactttcaggctcccattttttgcactggaattacttgccaaatggccttttcaccatctgaaatagttaatgtattcacttcttaaatgagcaaaagtcttcaaactattaagaaagagccatagactgagtgcaggcaccagtgtgctcttattactgtgtcaattaaatgaatgtatttgaatgtttggatacttacctctgaatgtattttgagtaataacttcaagtgcaaattatgccatgcataatttctttggtctcatgtttttccccccttttcttttaggctttgtcttctgagtctatagaaaaacttccagtttttaacaagtcagccttcaaacattatcagatgagctctgaggctgatgactggtgtatcccaagcagggaaccaaagaacctggcaaaagaagtggccatgtgaagagggacactcaggacactttacgggatcaaagtgggtctacaccagtgctgcttcctgaatgtttgtgtgtgaacccttgtttcctccaaaacaaacgacagcaacgaaaactccttaatcagaacactgatccaatgaggaatggagcttgtttctgtgacccaggagaacttagtgcaagactacaggagttaacagatggccagctccttattttttaatgtagaataactcctgagtttatatcaaatcctgaagaaataagcctcagttttccatctgtttttgataagaataagaaagggagtgagtgtgaagatggtggttagcagtttcactaagactgatattttaggcctcttgttcacatcaaaagatattggtgtcagaataccagcattttcctgccatgcaaaggattaaaacttagtttacactatgtggttacaaatatatgtcaatgtacattttgaacatatttatgtgctatggaaggaaatgctggtgactaaaataaggtttactctgaaagaggaggaattttattcaaagcattcaaacattttattcaagtgtttcaaaattcaaagcattgtattcaaagttgcagtgaaggcatcaacttatgtaaaaactcagaaggaaggctcctctgataaaaacacagctcctttattatgctgcttttcttgttcactttacacactaagtaaacacttattgtcaggtgcctagtcttgagtgaattgttagatgtgcactgaactcgggatgttggggattggagagagagaattgccaaagtaacagcaaaaatatctcttactttgctttgtttataaataaattagtagattggaaaaactagtgttagggaaagaaatcacatgttcagagcctaattcagtaggaagggcttttctctaccctgaaatgaaggtaatccaaaggcatccattttctaggcttaaaagatatatttttgatatatttaattatattctctacactccagcattaatatgtctgtttaaaaattactaattctcaaatggctcaagaacattagaatttaagtaccttttagagtaattattttaagcaaatagcctggacgtaagagattctcatgccagcatgctttcatttgtcagttgttgtgactgagagataatgaatgacacctgaaatgcatatggtatttttgggagagttaaggtataatttgaaggttggcagaccagttgcgctgattactcttagagaagaagaaatggaaaaatgaaagaaggcaggaaggaaagaaaggatataggaagagagggaagcagaaggcaggcatttttctattttccccacaaattatttcaaaaaaaatctgtattttctgggatatgtcattggcaagaggaagaactggtgttttgaaagcagtatggattctttaaatgcctctcactcttacaagatagtaggctttgagataataaacttacccgtgtcaattaacatttaaactggcatatagaaaaaaaggaggatttttctgcattgtaaaataatcagtatggtttatatgttgaatttgacatttgtgtgtaatttcatggtggcctagtgttgtggtgcttctggtaatggtaatagaagctcaactatttttttgtggatttcagtttttatcatcagaagtcctagacagtgacatttcttaatggtgggagtccagctcatgcatttctgattatacaaaacagtttgcagtaggttatttgtcatttcagttttttactgaaatttgagctaaacatttttacatgtaaatacttgtatttaccaaagatttaaatcagttgattaattaattaactcaaatactgtgaactatctctaaaacactagaaaaaagaaatgttagtatctcaattacaccaactgtgcaaatgaactttgataaaatagaaataatctacattggcctttgtgaaatctggggaagagctttaggattctagtagatggatactgaatactcaggcccacttaaattattaatgtatacattgtgtttttgtctttatgctatgtacagagaaatgtgataattttttataataaatattttttatgatgat

SEQ ID NO: 101 - DNA, 18872 bp, Homo sapiens
acaccctaaaacagtaatattcacggtaacagcaaagcggaaatcagcttttcctgaacatgtactgaattctagtcacattcacacacgttaattcatttaattccagccacaaggtaggcagcctctgttaacattttacaattgtgagaacgcagagatctgggactggctcaaggtgacacactgcagcaaggagtcagaatttgaatccgaagcagtgtccttccccctcgcaacagctgcggcgttacaaacacaggtcagccacggagaaattaatgacccacagccatccttgcagctctgcgccataactggggagacaagctggttcccgtgactcttcagtctgttttcacccaagtgcatgactgcgggagcaaagcgaccacgtgagcatcccccccccacccccccgcttcccccaggcgagggacagtgccaggccaaggacaagtcacaggtgcaacaacgtgccagaactggatccggagccccagggcgcaagatctcccgcagcgtcacccggcagagggacgggtgtggccaccgggcgcggcaggtcctgcgtgcgctgaaagtgcggctggaggcgcggacggctttccggagccccgagagaggagctaggaatgactttggtcgcagcctctgtaaccccgcatgacggcctctagggggacagcgaggtccccctcgatctctggctgtaatcagccggcggggccagacggtgccgagactccagggcgaggccgcagggagggggctgtcccgccccacgtggaccggctccccgctgggggcgtggccgccgaagcgggccgggccaatgagcgccaccgtcgggctcacccggctgggcacgccgggccgaggagggctgcgtcatgccgggggcggggcttcggggccggcgcgaggcgcggcggggtcacgcgggtcgctgcgcgggctataagtaggggccggcggggtgctccgctggagtgatggctgccggcgctctctgcgtggttcttcttctcggccgctgaaacccccgcggctgcttcctgggaaggtcgtgagtcccgctgagctgtccccggtgccgccgacccgggccgtgtgcccgtggctccagccgctgtcgcctcgatctcctcgtctcccgctccgccctcccttttccctggtgagtagtggcgccgcctcgtaaaggctctttcttctccccggggccgggcgcggacgccgtggcgctggaggcggacgccgtgggcggcgcggctggcttctctcttcgccgctggccgcctccactccgcccgtctgcccgcccgcgggcctttttggcggtccccgggcggcgcgcgcgggaacggcccttttccgattttcgcgcggagggcgcgcgcgggctggcagcgcaggggctgggctgggcgcgcgcgggccgcggaggacccggagccacgtgcctctccttctcgcgcgtcctactggggatgggggtctggagtagccggcagaggctattgcgggaccccgggcgcgtgggtagagcggggtgccccactggccccccaggggcacgcagctattgttatttcccccctcccccgcaggatgaacttgcgtcctttctcttctccgccatggaattctgctccgtgcttttagccctcctgagccaaagaaaccccagacaacagatgcccatacgcagcgtatagcagtaactccccagctcggtttctgtgccgtagtttacagtatttaattttatataatatatattatttattatagcatttttgatacctcatattctgtttacacatcttgaaaggcgctcagtagttctcttactaaacaaccactactccagagaatggcaacgctgattaccagtactacagctgctaccgccgcttctggtcctttggtggactacctatggatgctcatcctgggcttcattattgcatttgtcttggcattctccgtgggagccaatgatgtagcaaattcttttggtacagctgtgggctcaggtgtagtgaccctgaagcaagcctgcatcctagctagcatctttgaaacagtgggctctgtcttactgggggccaaagtgagcgaaaccatccggaagggcttgattgacgtggagatgtacaactcgactcaagggctgctgatggccggctcagtcagtgctatgtttggtaagttctttttatgttttgtcctcttcgtggtgggtgagcaaatttgtatcatgggtggttccatttttgtgcataacctttccgattaacctttctgaatgtgccacttacataatggaattttgatatttacttaataaaactttactatgtttcaggttctgctgtgtggcaactcgtggcttcgtttttgaagctccctatttctggaacccattgtattgttggtgcaactattggtttctccctcgtggcaaaggggcaggagggtgtcaagtggtctgaactgataaaaattggtatgtttaattccaaacggcttcttaattttcgttttcgtcatatgttaccatggcattaggtatgggaggatgtgttctaacgtcgagggacagacccaagaattttgaactcttaaacatttaaagtggtttttggtttctgattttcattatttgatattttttcttaatgtgttctattccagtgatgtcttggttcgtgtccccactgctttctggaattatgtctggaattttattcttcctggttcgtgcattcatcctccataaggtaacctttctcccccgtatgaagacctttcatggagcacacccaatcgatttcaaacccagtggtacttttgcagatgtgattggtgtataggtatgcggccttggaaaattttaaaaagctctttgttctgtgcatttcttgtatgttgtggagttctctgaaagcgagtttttaatactcaagagggcagtcaggaaggaaaaattgaatactatgatgtgccaagaagtaggagaaactgggagcaaaaaaataaggaaatttattttgcgtggttttgtgtagctgtatacacattatttgtttaaaccactgttatattcaggctaatataatacgtaaacttggagttcaagacagtgtcccctgtggcttttttaactaagctgccagttaaatgggtctctgccgtgctgattatcataaccagtttataagcttctagatgaggactctgcctcccatagtgacttgactccaatttctcagaatagttgaaaagaaccagttaaaggtagtttttggcccgccccccaaaaaaacttcaggcagccatttaatttcctgtccatttgaaaatcccttttaagtgacccagtttgcatttcttttatcaagaagtcttgctggctgcaaaataaatgttgacaagggattatgttggcataggactgagttacagtgaggataaatgcatttttctcaggaaacaaagttgtcctttttctaaggtgaatggctcttaacaatccattgtaagttcttaaaagtgttcctaaactgtagaaatctgagggagatagcataaatcccagcaggtaagaatgtattcagacccacttgtctggtctagttgtaagcttctctagggaaagatttgtctcttctctgtagaaattctatgactagtaaagtgattcactaatcactgttttccatagccagaatctggcagaatatagcagtttaacactttgaaaacttgaaatatctttagcctggtataatatgagagtaaacagttcattgatatttatggactcctaagtttggtactgttttattcagcagacaggtacgataagcatctaccttcccactccctacaactgtagtgtatgatactgggatgcttaaattagaggctcaccagtagtcatggaccagatttttttgttttttttagagttttcattagaactgtatatcttgctacttagcagagagtcagaagcattagtaggatctcctgttgtgaattcctgcttggtaaaggtttatgctggccctgtgttgattattgagtagcagatcattttgtttttggagagggtttgtgtgtttcacctccacaaaacacttattccccggaaggggaatggtggtgctctgaggtgcaaagagggattctcaggtgcccagaacctctcatttgaggaatgcatacccccacggtgttattgagggctgaagttagatacggtaactgatttcttaattgtatatttcctatatgggtatgggaatgggcatgatcaaatgatgaagaatgattggcatagtgtttaaaacaatattgactttgaggatcttcccccactctgtgcacgtgcacacacacactcttgcaggccaatccctcagtaacaggagttttcagttgagtatgaatatttctgcttccttttaggagttaaatttcaagaaaatatccttagactggtaagcttttggtatcttaactgctaaaatctgaatatttgaccattaagatatattccaactcttaaatgtctatcttgaaaattaagattaacatgacctttttttttaatttcaaaaaattgcttttaaacattttctattctctgaatgtttgttccaagcatgttggggataggtgggaacagacagaatggaggtgaggtacttctatttaggactggcatcgcacagaaggaatatgcttcagtgctcctgttgagtatttttaaattctagtcaaagaaaatagggcttttggcattctcattagttagaaatatatttaggatgtcttcccttttctttagacaaaaccagaatatccaatatgtaaaagtgaactattctggtgaagatggggggttttgtgaagacctttcctgtcccacatgactagacgatgaggcattcacattatttccaggtgaagttttacttgtgtgttaggtggatctctacaatgatgagacctttcttgttttaccttcttcctagactctctggaacttttgatttttttttaaccatgaacctgtatttcacaataaactattggtatagtagtgtcattcataccctaccccatccccaacaactttgcgtagagaatacctcagatttgtttacctcagggaatacttaattgggctatgctatacaggataataaatacacaggctgctacttcagactagtcaattacaatttgatttatggataatcatattacgaaatatctttgaaaatctattgagaagtccccacataatgtctttaaaacccaggaaatttttgggggtgggagtcttgggttgggttttttggagccttttttttttttttttgagacggagtctcactctgttgcccaggctggaatgcagtggcacgatctgggcttactgcaacctccgcctctcgggctcaagcaattctcctgcctcagcctcctgagtagctgggattacaggcgccaccacacccggctagtatttttgtatttttggtagagacggggtttcaccacgttggtcaagctggtcttgaactcctgacctcaggtgctctgtccgtcttggcctcccaaagtgctgggattacaggcttgagccactgcacctggctttttttttttcttaagcgaagtctcgcctgtcacccaggctggagtacggtgacttaattgtagctcactgcagccttgacctcccaggctcaagtgatcctcctgcctcagcctccagagtagctgggactatgggtgtgtgccaccacatctggctaactttttatattttatagaggtggagtcttgctctgttgcttaagttggtcttgaacttctgggctcaagccatcccctgcctcatcctcccaaagtgctaggattacagacagacatgagccaccaccacacctgacctgcattttcttaagactagtctttagaataaaaatacacaccttagtttcctaatcttgttgactgccctcagagtttgaccaccgttgagttagttattcaaggatgcttaacagttcttgatttctgtatgctattgtttttgttttggctatttcactatctgttaacattctctattaaactatagataagagttaaattttagagtggttttcaatgagtgctcatctctgctaatttgaaatggtacctttactttacacatgggtctgagctttcccttgtttcactggtcttaagctactaactttccagtgtattgattattgttggaagctgtagggttttactttctgtttttcctccccaagattttccactggaattgtgatcaagataacattaaaccttttaggctaaggtctttataaagtttttagccttcccatatatgtattcagatctttgctcccaatttttttttttttctgagatggagtcttactctgttgcccaggctggagtgaggtggcccagtctccactgactgcaacctctgtctcccaggttcaagtgattctcctgagtcagcctccagagtagctgggactacagatgcttgccaccacatccgggctaatttttttggtatttttagtagagacagggtttcaccgtattacccaggatggtctcgatctcctgacctcatgattgtcctgcctcggcctcccaaagtgctgggattacaggtgtgagccaccgcgcccagcctcctcccattctttcggtgtttgacttgggtgttctcctatagaattaatacatactaggtatggtagaattcttatttttagtcactggccttactgttccttaaacatttcaagtttttgccttagggcctttgcatttgctgatatctctgtctggaacattcagcgcccaaataatcaggtggtttgccccttctgtacccatagttaatgtacacagcttgctagcttactacatttatgtcatgcttattccttgaccctccccacccaaatggtgcccccccttccatcactctcctcttacccttctttatttctcttcacagcatttgtcagtactttacattattccatactagaaggtgagtgtcagttctattagaacaggaacttggtcttattccctcctatatttcggtgcccagaatagcacttggcacacagtcttttgagtgagtggatgaccttgtgcacaatcagttattatcattgaacttcggtaaagcattaattgtggcatctttgtcagatgtttagataagatggttggcgtacgcatagtctgcatgttgtatttttagtctttgaagatatgaagtcaggtaagcaacatcctaacatagtctatttcttgacatctcttacaaacgtagagtatagcctatcctcaggtgtgtgctgaagtttatattagggcttttgggtaccttagaatgtgggtattgcaatctttattcaggatgttatcagtcactggtacagttagtcttgttattaaaagaaaaaagaaaaaaaaacaggtagaagttggaattagccttcgtaggaagaattccagatgcaaatgcaggaaaaactctgttgtccttggaaactactctggagagagttattggcactataattcccaaacctaccctgttaaaagattctgtggaaatgggttaacctttataccttttaagatattgatcttaatgatgttttacaggcagatccagttcctaatggtttgcgagctttgccagttttctatgcctgcacagttggaataaacctcttttccatcatgtatactggagcaccgtgtaagtacctatcaaaatatttaaatgtgaatttaaagttgtttacaaaacttgcattaaatgcccaatttacccctttttgctttacagggctgaaatctcctagaaggtggctggcctgcgcccatttcagaaggctgcaggctagtgtacgctgagttaacctagatagtttttcaaccaaagagacctgctcagattctaaatcactacagacctttcctctttagtcttcacaggatccactgataatatgatcatctccttccctttctcctgtctatgctaaaaatgctggaattaatactgacctcaactactgaagtcattagttatatctgatcttcagtaatcagtcatttaggactggtttgctggatattctcatttttctctcccaaatggagatactattgtttctaagtactaaacttccatgaatctgcttgaatgagaagagttgggatgtttaccacctgctctaagtgcacttggaagaagaaattcatgcagctaagaggaaaaataatttgtgagaatataaaggttgaaatgttgatgactttcatgtttgggactaaggcaaggcatggattaaattatggcgctacaagtttaatttagcaacaacaaaagattggtaacttgtaactggcaggacagtacagttttggtatctagactcatttggcctgatggtctgtgactacataggcagtgacttttattctttatactgtgacccactggatgaaatacaggacacacatgtatgtatgtagagagaaagataactggaatagtgtcatgaagccacttaatgcttactatgtgctatgcacccatattttcaaattctctctttttttttttcttaacatttgttgtggcccactgaaatgatttcagttttgagtaatgggttgtgacttgctcttaaacctcactgaagtagtaagttgctgacccaaagtagagttagctaaatatttttattatttatttatttttttgagacagttttgctcttgttgcccaggctggagtgcaatggcatgatcttggctcaccacaacctctacctcccgggttcaagcaattctcctgcttcagcctcccaagtaactgggattacaggcgtgcaccaccaagcccggctgattttgtatttttagtagagacggggtttctccatgttggtcaggctggtctccaactcctgacctcaggtggtccgcctgcctcagcctcccaaagtgctgggattacagacatgatcaccgcacctcgccaatattttaattttttaccttattttagattgagggattatatgtgtattttgttagatggagctaagtatttttaatcttgctaattaattcttggaataatcaggaacgaaacagacaactttaagaaaatattgttcttacttagactatactgaactgctatgtgccggtgaagagaagtttgtatgccagatttccattgtaaacagttctttgtgataaactaaaaagtctcccatgatgctcttaacactcattctttatgtggtagaagcaaagctcagagatgagtgaaattagaatcattttaaaaacagaaacttagatattttcgttgtgtcctttatggatcatttgtaagaaaaaccagtctctttcctttttgacttggaatgtagaccaacttaaattgtgatagacagtaatttcatgtatattttagtttgtgtgaccacatgatcaaaattgaaagcagaatttaaaatgaaaagatacatagtcaccatagaattgtagtttggggccgggcgcggtggctcatgcttgtaatcccagcactttgggaggccgaggtgggtggatcatgaggtcaggagttcaagaccagcctggccaagttggtgaaacctcatctctactaaaaactagaaaaactaaccaggtgcagtggcaggcgcctgtaatcccagctacttcggaggctgaggcaggagaatcacttgagcctggtaggcggaggttgcagtgagccaagatcgtgccactgtactccagcctgggcgacagagtgcgatgctgtctcaaaaaaaaaaaaaaaaagttcaaaaacaaaaaaagttttagttttgaagggacctcaatttgtttctaattttttttttttttttttttttgagacagagtctcgccctgtcactcaggttggagtgcagtggtgcgaacttgggtgactgcaaccactacctcccgggtttgagcgattctcctgcttcagcctcccgagtagctgggattacacatgtgcatcaccacgcccagctaatttttgtatttttagtagatacgtggtttcaccgtgttggtcagtctggtcttgaactcccaacctcaggtgatccacggacctcagcctcccaaagtgctgggattacaggcgtgagctgccgcgtctggccttgtgtctgatttttaaagattaatcattttggggtatgatagaatttccagtttataagtacaaacagtccctgacttcatggttcaaccttcagttatttgactttttgatgggtttataggtacataacctcattgtaagttgaggagcatctgtgatttcgtacataacaagcaaaataaagcaaaacaagcagaagtaactaagctattcctagatatcaactacagatcattataatatcttttatgggttttttttttttttttttaccttttttgtttttcagggatggggtcttgctgtgttgcccaggctggccttgtattcctgggctcagggtgttctcacacttcagtctcctgagtagctagagatcattataacatctgttagatttaaataggattgtatagtgctttacttcttttcgtttgtttttgtgacggagtttcgctcttgtcacccaggctggctggagtgcagtggcacgatcttggctcactgcaacctcgacctcctgggttcaagtgattctcctgcctcagcctcccaagtagctgggattatagaagcccaccaccacatccagctgatttttttaattttcagtggagacggggtttcaccatgttggccaggctggtcttgaactcgtgacctcaggtgctccacctgtctcagcctcccaaagtgctgggattacaggtgtgagccactgtgcctggccagtgctttacttctgtctttagtacaggctaatggtttggagcctactggcgtgcatatgacagtcagataatgactaatattactcattcttaaaccatgtgaacagtgttgctaggcaagtctttttttaaggtaagacttgtaagtgaaattaccactaaactttgtgtgtgagaaagacaaaactttttttttttttttttttttttttgagacaaagtctgactttgtcacccaggctggagtgcagtggcgcaatctcagctcactgcaacctccgccctgccaggttcaagtgattctcccacctcagcctcccgagtagctgggactacaggcgcccaccaccatgcccggctaatttttttttgtatttttagtagagatggggttttgccatgttgggcaggctggtctcgaactcctgacctcaagtgatctgcctgccacggcctcccaaagtgctgggattacaggcatgagccaccgtgcctggctgaaagacaaagcttttacaactattcttaaattatcaacttttgatagataatatccttgttttctgtatcttgctttgatactgctttcaaggagataatctcattaaagcattttactaaaggccagtatagtgaatgtaatcacttttacacagaattgtgtcagcatgacaaatgtgactactgagacatcattctgttaacattaaaataagtttgtaggtggtaatggaatatgtggcagttacgatcatgagctaggagagtggaacacttgctgtctttttcatagctagtcataggtccttagcgtgtagtgatctttattatcttccaaggtgaagaaaggaaaaggctcgtatgttgagaagcataggaacttgagtcccgcaggtgttcaagtgggctaggctggtgtgggttttcagatgatcattgagtttttctcccaaatttgtataggcactagcacagtaatcctgtgcacttaaatctggcagcagctgtcaggggtgatgggctggtatggggaacccctcagtccccagaggagggtttacacaatattgcagggggctgttgccctggggttttcaagatgcaccattttatctcctagtgctgggctttgacaaacttcctctgtggggtaccatcctcatctcggtgggatgtgcagttttctgtgcccttatcgtctggttctttgtatgtcccaggatgaagagaaaaattgaacgtaagtaataactaaacagcagaaaagtttaactactaatgttgtgtttattttttatttggccacctgtaaaaatctattagaagagattggcaaaataagagattttaaagggaaatttgaggatatgggtttgttgtccaaactgtttttagaaatggacttacatgacctaagacctgttcttaaaaatggacttacatgacctaagacctagtgataaagagtattcaacctatgctgtagagacaatctggggcattgaatttttttatgttccttgatcagttgccagtgacatgatagataaatagagaaatcatagcctacatttactgagaagtagaaggataccttaatgaaaaataaggggtagatacaagatattttcgtagaggaaatatttaccccaactgcttctgtgtataacttcagattcagacaagcaaagctaagtctaatgtgtacatgttgtatataggctagaatacatgtagacattgtattgcagtatacaatgcaaatacatatacaaacacacattgtgtgtctgctagaattgtagcacagattctagaagtaaacattttcaagtgtcaaggaatcatttaggccattaccacacactcatgtaattaaatactgagtaaattttggttagtatcggacttttttttccttaaaataatcattttctgcccttttcatcgatgtgaaggctgggttagcaagttgaagtttatcgtttcgaagctgagggatgcatagactgcagtggtgttaggaagaacgctgcgtcaccgcagctgaaccgaagagcctccgagaggttctgtgctagtctggctgtgccgagtgcacggtgggaaccaggctttcaggactctctggcctcattttccctctctgggaggagttgagacaagtcttgctttatgttagtcagtctgtagtttgactgaggtgcctggatggataggtcagcatactgagcactggcatgagagaggcagaagatactctggtctgcctgtgggatttacagccatgatgcacatctctttgttttatagaggtggaaattaaagttgtcgtctttagttccctgcattgagctgtgccactttgcttgaattggtggactgaaatttgagagaatcctcttttgaaaagaatagaattgggtacagttcagatttttagtttcagcttatcagccccatggttgagctactttcccctacagaatgagtcagcagggagctaagaagggttcttatatctgtaaagggttgtaaaaataaaaacaaaacaacaatgtgctacagaagcccgtaaaacctaaaatatttacagaaaaattttgggacccctgacatagggtgttctgcattgctggttgttcccaagtgagagttgctggcaaatgataaagcaggcaggaaaaatgttcctgaatgttaattgaagttcacatacattcttgttttgagatgagttttttgggggtggaggaaaggagacgtggaacaaagtagtatggccacaaccaaaccaaaaaagaccccccttttttttcctaggagaaataaagtgtagtccttctgaaagccccttaatggaaaaaaagaatagcttgaaagaagaccatgaagaaacaaagttgtctgttggtgatattgaaaacaagcatcctgtttctgaggtagggcctgccactgtgcccctccaggctgtggtggaggagagaacagtctcattcaaacttggagatttggaggaagctccagagagagagaggcttcccagcgtggacttgaaagaggaaaccagcatagatagcaccgtgaatggtgagttggaattcctggtttcacttttgttacctgcagtggtgaggaggcttattgttttggatttgatgctttttgtattgaatgtcaccttggtgatcttgactaggtgcagtgcagttgcctaatgggaaccttgtccagttcagtcaagccgtcagcaaccaaataaactccagtggccactaccagtatcacaccgtgcataaggattccggcctgtacaaagagctactccataaattacatcttgccaaggtgggagattgcatgggagactccggtgacaaacccttaaggcgcaataatagctatacttcctataccatggcaatatgtggcatgcctctggattcattccgtgccaaagaaggtgaacagaagggcgaagaaatggagaagctgacatggcctaatgcagactccaagaagcgaattcgaatggacagttacaccagttactgcaatgctgtgtctgaccttcactcagcatctgagatagacatgagtgtcaaggcagagatgggtctaggtgacagaaaaggaagtaatggctctctagaagaatggtatgaccaggataagcctgaagtctctctcctcttccagttcctgcagatccttacagcctgctttgggtcattcgcccatggtggcaatgacgtaaggtcagttgacattgatcttagtgttgctaaccctatttttaaaccatttatccttgtcacaggcctgtgcttgtggtagtggtactcctagcatttacaggaccccaaataatacaaataggatgaggtaatagcagttattgacataataagacagtacagttttattcttcagaggaattacaaagaatgtttatttttgtagatgataaatataaacagatactcttcacagagaaggcttttgtccatcaagatgagattcagttctttggtagtgaattgtgggatgtaagatgtaagatgaaaaacttaaaagtttttcatatagaatgattttgtagtttggtttgtaaactgtttattggaacctgagagttgctttaagctgcctataggaggaaagaggccaccatttgcctggcattccctccatcagagctgtgttcatttttctgttgtgtatgttggggttccatttatgtctttagaaagaaaggcccttttgccagatgagcttgaaagctgtactttagacaacctggtagatcattcagcagattgggtcttgccaagatctagttctgcctgaaaagtcacttctgccctctttgtttcttccagcaatgccattgggcctctggttgctttatatttggtttatgacacaggagatgtttcttcaaaagtggcaacaccaatatggcttctactctatggtggtgttggtatctgtgttggtctgtgggtttggggaagaagagttatccagaccatggggaaggatctgacaccgatcacaccctctaggtaagtaggtggagcaggttctacaaatgtcagtactcatttttttcagagatataacactgtcgagtgctaacacaaatctctaaagtaaccaagtttgtataagttcatgatgttcttattgtcattgttctttttagattttacttgtctggcccttaaacattttggtcagacattttacccatttagctctggtggtctctgaagaaaatgacttttctgagaaagctgtgtatgctaagagcggatagttatgtatacttgccttttatttgtcttgggagctaagactcaatgtttaccaaactcttcaaaataaaagtgcaaattttatttaatagtgggattccagaaaaacgtaaaactggaagcctttgaataaggaaactgggcatctgtggcctgatttaaataaagtagatcttaggggttatagcaaataaagatgtcagtggaggttttgtgactgagtagaacaaagcaggactgtgttaacttgaggtgtagtgttagcttctcaaaaaagtcaaactcacttcctgacaagaatccttttgtgtctgtagtggcttcagtattgaactggcatctgccctcactgtggtgattgcatcaaatattggccttcccatcagtacaacacattgtaaagtaagtgtaatgccaatgtgtgtctttcaaatggttcttctaatatgtagggtttttagttttacttctctgatactttgatttagaaagttttgtgcagttggagtcttgaagagttcataagttatttcttgtgtttattcttatttaagcaattaaatagatattctccccaaataatagaaacattgttttatatacagcttactgtagtttctggctactaacctcttcctttgttactttatcctccctcattgtagtctctttataataattttttttttaatctcaagagtcatttctacttggcaccattatgttttatttatttatgtatgagttggagtcttgctgtgtcacctgggctggagttcagtggcacaatctcggctcattgcaacctccgcctcctgggctcaagtgattcttgtgcttcagcctctcaagtagctgggattataggcacccgccaccatgcctggctaatttttgtatttttagtagacacaggatttcaccatgttggccaagctggtcatgaactcctaacctcaggtgatccacctggctcggcctcccaaagtgctaggattacatgcgtgagccaccgcgcccggccgacagcattatgttctttgcctttggggaagccattcagagcagggtaggtgtatgcttagaaactggcaggtgctttaattctggccaggtgggtttctgctgccatttgtggtggctgaaggcctggttctaacaagtctgtgaggcttgccaaaatgttggcaaagcagtttatttacagaaggcatatttcagggcctctcaggattgaaatactgagaaacaaaacaaatcttaaggttgtttgatgacaatctaataattataggagaaggaagaaactggtttccttaagagcatttaagctggtccatcatggatcctgctgagtcatctgtttgctacccggatgtgtctccagacaattgtttattaggtttaatatcagccactctgtaaataatcttaggaagacttacaatgcaatttgttattaaaagcagtgtataggccaggtgcagtggctcatgcctgtaatcccagcactttgggaggccaaggcaggtggatcacaaggtcaggagtttgagaccagcctggccaacatagtgaaaccccatctctactaaaaatacaaaaaattagctaggcgtggtggtgggtgcctgtaatcccagcacttgggaggctgaggcaggagaatcacatgaaaccaggaggtggaggttgcagtgagccaagattgcgccactgtactccagcctgggcgacagtgcgagactccgtctcaaaaaataaataaataaaagcagtatatattcattaaattttagcagtagctgagaaggggaaaagaaatagttcttgtgtccttttactaccgttagtatagattatgattggattttcaaattgccttcattttcccagcttaacctgttgtaaaccagctttcttggactttgtcttgtccaggggtctggggctccttgtccaaacagtctcaggtgtctgtttgccagaataccactggcacttcaataacctgtttccttggtctgcttctcttctaggtgggctctgttgtgtctgttggctggctccggtccaagaaggctgttgactggcgtctctttcgtaacatttttatggcctggtttgtcacagtccccatttctggagttatcagtgctgccatcatggcaatcttcagatatgtcatcctcagaatgtgaagctgtttgagattaaaatttgtgtcaatgtttgggaccatcttaggtattcctgctcccctgaagaatgattacagtgttaacagaagactgacaagagtctttttatttgggagccagaggagggaagtgttacttgtgctataactgcttttgtgctaaatatgaattgtctcaaaattagctgtgtaaaatagcccgggttccactggctcctgctgaggtcccctttccttctgggctgtgaattcctgtacatatttctctactttttgtatcaggcttcaattccattatgttttaatgttgtctctgaagatgacttgtgatttttttttcttttttttaaaccatgaagagccgtttgacagagcatgctctgcgttgttggtttcaccagcttctgccctcacatgcacagggatttaacaacaaaaatataactacaacttcccttgtagtctcttatataagtagagtccttggtactctgccctcctgtcagtagtggcaggatctattggcatattcgggagcttcttagagggatgaggttctttgaacacagtgaaaatttaaattagtaacttttttgcaagcagtttattgactgttattgctaagaagaagtaagaaagaaaaagcctgttggcaatcttggttatttctttaagatttctggcagtgtgggatggatgaatgaagtggaatgtgaactttgggcaagttaagtgggacagccttccatgttcatttgtctacctcttaactgaataaaaaagcctacagtttttag

SEQ ID NO: 102 - DNA, 21596 bp, Homo sapiens
ccctgcggcttttgaaaagaggtttcaggctgacaaatatccatatatacatatatatttatatttaagcctaaaacgactctttgatccctcccctaagacctccttcccgtccgcctaggcctcggtatcccccaccaggtatgagaaggaggagtcttcattcttcccaggcggggagaccacgccttccctgcctcctccctccgcggggggtcgcgttggaggtcacccccgccccctaggcgctgggttgggagtgacgcggggtgggctggagaggtttcctgccgtctgggaagcgtaaacggaccgcccacctgtcgggcctcggccgcccgcacctgcttgtgagaagcctgcggctggggcaccgcccccggtccccgcccgggtccgcgcattgggagcacactggccctttaagagcgcggcggccgcggcgcgcggggaggagggctgggagcgcccggagccgcgctgaactcgccggggacgtcgggcgcccgctccttggctggctcgcttgctctctcgctcgctctctcgggtcggctccctgcgcctcctcccgggactgcttggggacccgggcccggtcgggcgcggcggcgagcagaatccccgtgcaggaggcgcgcgctccgggcagcgcccggccccgggcatggacagagggagctgggcgcgcagggagcgccgcgggaccgggcggccggagcgctgagccagacaaaggctccggagttgcgcttgctctcgggagccgggccccaggcgctgggcgccgaggctgcggaacctcgccgggggcagctccggtcggccccctttcccgccggctggttccgagctcccggacctgccctgcccgcttctcctcgggcttgggaatttgccgaggcgacctaggcggctccggcggggaccgggagcccgaggtccgcggcgcgcctgccgggccaggagccagggagcgtcgcaagtttccaaggcgcgtgcgaggatccggcgtgcagtgttccgagctgggctgggcgccgagagcatgggcagcgacccgagcgcgcccggacggccgggctggacgggcagcctcctcggcgaccgggaggaggcggcgcggccgcgactgctgccgctgctcctggtgcttctgggctgcctgggccttggcgtagcggccgaagacgcggaggtccatgccgaggtaagacccccgccctgccctttggctgcgggctgggggcttggagggagaggcgccacgtccgcaggctgggacttggaggtggagggagcggagacgcgccccctgttctgggccgtggcggggaagcaagcggacttggcagtctgcccctccccagctcgccctctgcagcgcacctcttcgcaaacccttgagggcgcagggcctcgctctcctccccgctactcctacagccctgttctgggcactgagcccccaccccgacccccttacattcagcctgtgtcccgggagccgcttccgccgcccccagcccttgcctcccctccttccttccctccagggcagccgattcctcgagagcccggctggcgcgcagtggcgctctttgcgagtggggagggggctgctctcggggacagccacaggcggagcaagagctgggcggctgggcaactgcgctcctgcccaggtggcctcccgtctgggtgataccgagccgcgcacggcgggccaggatggaggcggggggatgggtgcaaacggctgaggcagcggactcgggttgcgggggcgctttggcgactttctgcgcttttgcgaggaagcctaggcacgcccgggcggggtcctaaggacggaccctgcctcccacagcgcttcctcccaacagcgcccctacgtcgaagccctggattcgagagggtggaccccgcgcctctcttcgctaggagcccgcttggcgtccctcccggggccccgctctggatgggtcccgcgggtgaccaggcgcgacatcccggcgtagagccgagtccagccagcgccccagctccatggtgtctcccgagcgaggacaccgaaggcgccagctttcttgccccagagcaagagcagggtccactcttccccgacttctaagacctgcgccctgccccagataggcggggagaggacttgggcggggagtagggagaaagaaccaccccggagccgcttctgaacggtgctcaggccttggtgcccttgggctgcccgggctgcgggcctgagcgccgtttctatttgcagctcagctggtgctccctccctggcccacggcggctttcccacctctccgggctgcctgggagatttttccgatggaagcttgcccttccccgccctactttaataaaagcatagaggaagggcagggaattcctcctgggctcgagttacacctcccagccatttccccacctgctctgccctccctccctggcctggccagggagagctgaaggaggagccaggccctggtgggaggcaggataggagccccgccccgacccagtctggccaccctcccccaccccattcacacaggcaggaggagctttagggggctcctgttggtgaggattacccctcagcctgtgacccaagtactgggcggagagtgccatttgggcccacctgccactctgggctggagtgccaaagaatttcaagtcacagtcccaccattgagtttctaatctacttagggatggcgtcaatacataggaagcagtgatggaattcaatggccgtgcattgctaatggcatcctagctggccaggagctcaggggtgcagggacctgtagttggaggggcttcactctctctctcttctgcttttccagttccatctcacccctaccccaactccccagctcagggagtgcccacagctcgatgccgccagggaagaagccatggttgcgttatcacaaaccgtgctcctgatctggaggttgtgactgtcctggagccctactcctggggaaacacttgggttggacctgggcagtgactggaagagaccccggaaggtttaaggagccttgaatgttggcagccatgcagatagagggctagagacaggtggagtgtcccagctcctacagttggctttgggtacaggctgcttctagggtcccatcaggtctggccacatgtgggcccaaagagtcaaatggcctcagcagccagcccatctgccgggggctgtggcctcagactcctgggcctggcctacaccctgtgttgagcctcccttccttggagaaggctggctctctcatcctcaccccagcatccacacagcctcaggcctccagtagggtcacagctgggaccttctcggagcagcttggcagctgagccaaggccagcctctctccacttcctctctcccctcccagggtggaagccacaggactttcacgaggctgagacatcaaggagcctggcatgtgctaggaactgacaaacacctgcaacctgccaggccctagcccaccactgagctgccacgtcctatcccacattctcccttggatgtccaatcccagtctgtagccattccgggccagatccccacctggctgaggtgctcactgttgttcctgccctgcagggctgagagtctccaggctcaccgggggagctcttatctcacctgcctccccctaccccctcctcccaggcacaattcaggtcctcagcctgctctgtggaggtgactcaggctgccagagttcacaggggtggtgccaccaccaccaaaaccgatccacccgcctttcctcaacaggcccacgagtatcttcctagcccctacccagccactgagtagatgaggcagcgggggtgggggcgttgggagggggtcagcgtgaattaccattttgaccttcaggtgagccacagtcttgggcttccttagcttcagtctctactagcacttccatgctggctccgggggggccccactggtcccctctttcttttaaacagagcaaaactacagatgccatctgtgcccaccagctaagaaaagggagttaatagcggggccttgtcattgggaatctgcagaagctgaatcttctccccctcccctcttgtctctgctttttactctgttttcttgctagtagtaaatcactcctctccatgctctgtcaagacccagagagaactggtctgattggcacagccagggacctagatctcattgggccatgcccttcacacccagcccttgccatgtttccgagttggggctgcccttgggtccagccagtcatctgtctccttgcagagaacagcccagtgtaagctccttgtctgagcagtgtattggcctgaccttcccattgtgacctctgaacataaatacctcctttgccccaccccaagggatgttgatacttaaaagatatccatgaatgtggagaggagcaacatggaaatacacgctatccccacccccaaaagaagactttccccaaaagcccagtgcccactgctatctcttatgcccattcaggatggctacactgcaggcgtggaaaagcccctccctgccgagcggtttgttctgctgtccctctgtggcccttttgttgtttggtccagatgatcccttccatcatcacctctgccctgctgggagtttgacctctgcctcaggctagctgtggtggtcactatgagaaccactactttccagatcaaatcagaatgggtatcctccatatcatcccaaggcttaggtggctccctgtcttggacactccagcaggagcaatgctttggtcctggagatgtgttttctgagtcagcaaagacagagaggggttgtggactctgcccttatctttctcctttacaaagcgggtcctgggagaagcccaccattgagtgtgaggaccgggaccctgaaggcggctgaatgctccagacctgagacacagtaggcaccatctggctggacagctctgagtgacggctcagatagggctgctccacagtcagacacaggttccagggattcctgagaccagaggccatggagctgggcctggatcccagaggcaaagagggatgcctcttccctaatcccatggccctcgtgggaatggaagaaaaagtgggaagagacccaactcagcctccagtatcaggacaggtggataagcccctggtaccagccattagccagcccctggagatgccccccatcctgctgccatcggccgatggtgatgcaggccaaggtctagatcacctctccagggcactggcactggcactgccttgtccttcccctaggagtgactgtcaccctgtaggggtgagagtccagctccacgttcagcgtttctgagcatggcacttgatacatagtgcacaacacggtggcctacaccctgtgtccagagcctccctggcaaaatagtgcaaaacagtgacagaagcgaatggcatttactgttgggcaagtcactgaatctgtatgaacttcaagatctctataaaaagggaatagcaatggtctatctgcttgatggagttacggggagattcattgcatttatgtgcaaaacactaaacgctatgcacaatgcctggcacagggggcctaaggaggcgcaggtgttatttttgagcaccttcaacatacttgtgtctgttgtggacacagactagggatgttttgtaagcgttttcacatttaatccttgtattaactcttcaagtgtagatgctgtcattactcaatctacaaaagaggaaactaatactgtgagttgagagaaatgacccccgcattccatagccagggagtggcagagcttggatttgaacccagctcagtctggcctggagcccaagttcccaacccccatgcggggttgaaggctacaggtcagagcctagggtgccatcctgtggaaattccaccaggcagaattctgctgggcccgatccaggtgggaaagaggtttctgaggtggagccagggctgcctgagctgtgtgagccaaaagccctcccccggcccacccagccttgcccccatctgtccagccacccaagctctgccctgtggacagccccgtctaggagtcagcacctgcagggaggtttccaggtgaggacccaaggccgggcccccagccaggcccgaaactcctggctaacagaggcctcttcaccccgcgcgctggccagggaacccggttgttttttcctccaagttaaggagtgtggggcaggctggaaggctgctgggtaaagaagtggtcagacctcaagacgtcttcctccttcctgcttctcctgctggacttccccaccacccagagtcccagcccccacctgcaactcgcttaaagacccatgggagggagcagatttaatcccagactaagcatgtgtgtcctagaactgctgaaatgtggaacatgctgcctctaaaggtagtgagcaatcctccaaggaggacctggctcgatgccgcctttttttttttttttttttttttttttttttgagacagagtctcgctcttgtggcccaggctggagtgcagtggcgtgatctcggctcactgcaacctccgcctcccaggttcaggcaattctcctgcttcagcctcccaagtagctgggactacaggcgctgccaccacacctggctaattttttgtatttttagtagagacagggtttcactgtgttagccagattgtctcagtctcctgacctcgtgatctgcccgcctcggcctcccaaagtgctggaattataggcgtgagctgccatgccctgcccatgccacctttctttactggccttgggggtagttgcgccatcggcgctctcaacgctgcttggtgggtcggagtgatgatcttggccctattttgcagaggagggaactaaggctcagaaaagttatcctagccgtcttccgttgctgggaggcctgttgtgtggactagcagtcaggaccaaggggcagccttccgggggctgacttccgctcagcctgaggaagagctaacagtccttgctgtccagagagagaatggggggccttgagtggcagtgagcgccccctgtctgcaggatacaggctgatgagtttttggccagctgtagtccgtagaggcctggcgggtggctgggcttggtggtattggggccacccagctggtgaatggactcttggctcaggtccgctgatccaggtgggccctgtgggcctggagtgtgcactctgccttctgcaagctccctggctcctccaggactcatcccattcagcacaggctctgtgcctagtggctgggagtacagagctgggcacagccttggcctgctccctagagccctccataccaagactatagggtaggggagatgggcatggtaaggacctcacaaggccacaaaaggtccgggggctggatccatcgctggcagccttgacaaggcttcttttgtgcctggctgggcaactctgcctgggtctgctcagattgcagacagaacctgggtgacagagacaaagcagagcccagtggaaagtgtccttatcgcctggggtctgataagggccccggggagggggctgccggccagctccacagatctgagtgctggaggagctggaagggccggctggggcggctgcagcagacgcttgccccctcccccaccccactcccactcccccaccgtggcggctgctcactgcacagtattgatctagtggcttcttacaccaaccctctcagcagccagtgggggagggtggactgagatggcccagcgcccagacccggccggagatgtcgggtgtggggaggattaggcacccttccccgtgctgtgctgggcactgctcctgagaaaggtccagtgtccccagcctgaggccaagaggagctggtgatacttcagaagcagcctggtccgatagccccagctccagcccagatcagctctgggaccctgggtgaggcactcactatctctgaaccttgccgtctgtattatgggaatggtcacaaatctacccttcaggagtggctgtgagcattcagtgggggctggaatgggtggctggcccatgccagactcaggtgctgcggttatgacctctcctgtgtgccaggggccaggaaccacccttctgactcctggtggcccatatctccttgccacttacctgaagtgtcaataaatacgaatgggatggggtctggaagtcaagaaagaaattggccaggcgtggtggctccgcctgtaatcccagcaatttgggaggccaaggcaggcggatcacctgaggtcagtagttcgagaccagcctggccaccatagtgaaactgtgtctctaccaaaaatagaaaaattagctgggcatggtggcacatgcctgcagtcccagctactcaggaggctgaggcagaagaatcgcttgaactcaggaggcagaagttgcagtgaaccgagatcatgccactgcactccatcctgggtgacagagcgagactccgtctcaaaaaaagaaaagaaatggctgagagaaccacagtggcaggtgccccccacagcagcccacacccgaagctgcagaagggaggggccctcatggccccagagctctccttccctcccattggacagtggccttggtggcagaagaaaccaagtcctgcttcaaattctgccgtactctgccacttacaagactttctgagcctcagtttcctcacttgagaagcaaagcttcacccgcttggctcaccccacctgtgactctaggtgacaggaagagattccttgtattagggacagtttttacagtcaccaggaggagcagcaagggcttgaacactgggattgcgagtcatgacctagggactcatctgcgccttttgcccagtggcagcagagcagttcagcaagctccccacgctgcccacctgcaggcagcagcacctctggccccacccccgcgtccccgccccctgctgtctcttccctcctgtgttcccctgagcttgtcccacttagtgtggcaggaaggtgccaggaaacttcttcctggaccctggggaaaggaggaagctcacagtcctatgggtggtattgctgccacccgggcagatttttgggcacttggcgttcagtcaccctgagcacactttcaccggtcaggcacgctctgccagcttcgccttgttatccagaggtttgagtggtctgcgccaaggccgtgtttctgcctaccaccccccagcttccccaatcactgcccaaggggtgcccccatcctcagcctctggctcttcaccccaggtggctgagggttcaagcttggctgatagcgagatggaagctcttgacttccctggaactcaatactgtttctctgtgtggagggtccatagtgcccttgggaccctcctggcagcccctgagctggccccggggttgaaggggcccctctgccggtctctggagctcttcactgcagacaggccagctcccttgctttcctccccagggccccagcctgatcctcccccaccctcccctcctgtcgctccgcagataccgctaatcagcccctccatggcccatgattgcgctcccagagatatttttaccttatgcaaataggtgatgtagaggtgccctcatctgccggcagccagtcccccgccactcccccggcctccagctgcattccctttgccgttagagctggctgagcatcatggcctcgccttctagatctccctaagcaccttcagggaaactgtcctttaaggatggtggatctgctgctccacaccttccagcacaggagccttgggagaggtttcccgtgcttgggaagaacagggagggtacccacgacattgccagtatcttattgagctgtgggaatgcgccctgggccagaggtgaggagtgctagtggaggggccctaggggcctcctgcctccctccactctggggtcctggtggagcctggcccatcaccagtcttgggaagtccagacccatcagccttcttggtcaatgatgggtcaaggaggccgaaggctgcctgccccagggacaaccacacaggcctctggtctctgtcatttgcacgtttgtcgagcaccatctgctgcacagggtggtgtcaggcactagcatgcactttacgattcctcctcacaggaacccaggagatgaggcaggtcctggtgcaatcccccttttactgatgaccgacagagataaggaggtggagtgacacctcggaaatagccaagccagggtctgcctagctccacctgtccccagagctggtggtggtttctcagctctgcatttccacctcattgctctggggctgtttcccgggtcctgagaggcctcaaagctgtggctgcgcatccagtctgcgaccctggcagcttctccatgctgcccctccttgggtcagcagctgctccgtctattggcagcctgggtaccactgagctggcctgcccagccacaccagggacctggccgggtgccagggctgggctggtggatggtaccagaaagcaggtgcctgaggtattagatgtaacactggtggcaggcagatatgtgagtgtgatctggccggccaatatggctgtcagcctaaagcaaccaccgtgtccagctactgccctgctgcctgggccctcggggtgcagccctcacctcccagagcactcagagtgccagccttaagggcttctcactctggagacccccagagacccagacaagtcagacacagacacttgcagtgtccaaggtccagggcagcccctggcctctgctcactgcctcccatggcggtcaccgtgctcttgagggcttgaggacatgaagcaggcagggcagaatcccctctctaccacagctcggcctgtctctgccctctggcttggccgtgcaacctgtggggtgtgggttccttgttttgtaggtgtgttgggtctcccagggagactgtaagttcctgaaggccaggatgcctcagcctagtcctcccatggcccccagctggcacagagggtgttgagaaacatctggcagggtgggtggtggatggatgagaagacttgccaagcaagccctagaaagggaagggcacacccattgtgtaccagctttttccaaggctgttttcctcaaacctcacccctcagcagcccatggttccccattctataggtgaggaagctggggcccagggagaataaagagtttgtagcagagcagggactgggcttcaggcttctgtcctgcccttgagcctggatgggtacctgcatctgtctactccttccaggagatttaaggtctttggggagcagtgccaaagagtaaggcctcaagaggtcctgaatccttttgggtccttggcctggtaggggcccaccccagaggggctagtgcagttgtcagctactgtggacacagcttctgtcctaatgggggaagacaaatagcaaacacctaattgaaatgtacagtgcatcagatgggtgataagcatgggaggaaggagggggtgcagggtatagctgatggggcctttttaacgtgtcagagaagacctcttagataaggtggtattgaaacagcgacctgaagaaaatgaggatgaaagcctctcagttgtctggcgggagagtgcatcaggcagcagaggcaggaagtgcaaaggccctgcggcaggagcatgcccggctggggtggatggtggtgaggtccagctaaggtggggtgacagtgagggccttgtggctcttgtacaaatggcttttcctttgcaatgggaaatcttcagagggttctaagcagaggattgaccagacctgacctggcctttgttctggctcttatgtgaggagagatgacagggaggagggtgctgaggctcacacggtcacctgggcaggaggtgatgacggctcagatagagcagcggtggtggaggtggtgggaagtggtcggcacaggctgtgcatgtttggaggtagcagtgccaggacctgctgacagagttgcggcttctttgcagaactggctgcggctttatggctacctgcctcagcccagccgccatatgtccaccatgcgttccgcccagatcttggcctcggcccttgcagagatgcagcgcttctacgggatcccagtcaccggtgtgctcgacgaagagaccaaggagtgagttccccccaccatccacaccccacaggcacctgccttccatctggcctgctctcaagagggctcagcatgtggagtttccagaaaagagtggcctagataagagatgccaaatggtttggtcctccatgtcacttctgattggttggagtggctgcccaaagccttgtattgagaaagctccaggggcagaatccaggccttagcagtaagaagcacagtgattgattagtgatgtctgacatggccaggggagtgtggaggtacagtacaggagctgtggaagggaaatcgtagctaggcatggctatgaatctaacaagtgacatgacctaaagccatgtccctgaaaacaatgcacagagcataacgtatccaggacagaaggccttgagcgaaccctccattactgggtgataaggagagaagggctcaccttgactgaaccactcctgggcactcagtcttccaatacaggcattttgcccattttactggaagttgaagctgagagtcccccatccccactgtgtcataggaggggcggctgggaagcccggaagtggcggaagtggcagtgccagaacaggcaggtgtgtggaggggaggctccgtgctcacccctctgtgtccatgtcccaggtggatgaagcggccccgctgtggggtgccagaccagttcggggtacgagtgaaagccaacctgcggcggcgtcggaagcgctacgccctcaccgggaggaagtggaacaaccaccatctgacctttaggtagggggctcagctgcccagggaagcatctgcccctcggcaggccgagcctcagacctcctttcccagagcccacctcggcgcccagccttaacagtccagcccgctttcacgctgatgagaccagccacacacgccaggcagtctccctcgagggaaggtcaggacacttcaagctacttccaccctgtccttccccaccccccacctccctgcaggcaggggctggcctcactgggcacagctgggctactgccccagcacagactgcagcaagggatgggggatggctggggtgcaggaatccaggcatccatcaagtgaacaggcagcaagtcacctgcagaatccttggatcaggggccctcatcctttttgctgagttcttgagcaagaaaaccctccagccaagtgtgccttgagccatgtggttgtccccaagggctccccttcttgttccagtctggctctgtcctgactccaagctccatctcccaaggaagagtggttcccatggtcacttagacctcaagcccccagagtgaattcaaggtccaaccagctaaaatattcccttcaggtttaatgtctagcacacagagctgaatctgatttatataggtaagagcaggcctcaccatacgtcatcaaatgcagtctctggctacaacttacttcctctaatcctcactggaaccctgtgaagaaagtaccacacacacactcttttctaacttaacagataaactggaaatcggccaggcacagtggctcacacctgtaatcccagcactttgggaggccaaagtgggtggatcagctgaggtcgggagttcgaaaccagcctgaccaacatggaaaaaccccgtctctactaaaaatacaaaattagccaggtgtggtggtgcatgcctgtaatcccagctacttgggaggccgaggcaggagactcacttgaacccgggaggtggaggttgcagtgagccgagattgcgccactgcgctccagcccgggtgacagagcaagactccatctcaaaaagaaagaaggaaagaaactggaaatcagagagtcacttacccaaggtcacacagatactgttagagccaggccttgaactcaggtctgcctgaccctggagctcaacattgagaactgctcagcctgtttcccaaacctcactcatttgcatcccattttctaggtctttcccccagccacatagcacctgtattttagtttacttaatgtctctcttacttaaaatcagtttatttgccacaatgcaatcttaatttaatgatatcttcatgatctcctggatttgacaaattcaaattatgatttacatcaaagcaaactgccagttgataatgacgggcttgttggtgaccttgcgtgcactcttgggaacatgccagcagaggatagtaggcccttggccctgcatccgctcactcatctcccacccacccccagcatccagaactacacggagaagttgggctggtaccactcgatggaggcggtgcgcagggccttccgcgtgtgggagcaggccacgcccctggtcttccaggaggtgccctatgaggacatccggctgcggcgacagaaggaggccgacatcatggtactctttgcctctggcttccacggcgacagctcgccgtttgatggcaccggtggctttctggcccacgcctatttccctggccccggcctaggcggggacacccattttgacgcagatgagccctggaccttctccagcactgacctgcatggtgaggacagctggccagggtgaggggcagggcaggtggccccggagctgggcaacaacaccctgctgagtgggttcagcagccgcggggctgggaggagagagttcccctgtgtttgtctccagatcactacactcaatttcagtctgttgtcccaccatctccaaggggaggcgagaaaggatgattgtacccatttctcagatggggttgttgtaggccgaaagagctcagcctcttccaagagggaagcaagggcaggctctctggcagcctcagcctggagggtccagggtgattgggtcctgggactggccacagctgactgtgctgccctccttctctccccaaaaggaaacaacctcttcctggtggcagtgcatgagctgggccacgcgctggggctggagcactccagcaaccccaatgccatcatggcgccgttctaccagtggaaggacgttgacaacttcaagctgcccgaggacgatctccgtggcatccagcagctctacggtgcgtgggctgtgaccagcgggctctgcatgccgctctcaagtccctggccaatgaggagtaggcattgctgccatccccattttgtagatgaggaacccaaggctcagtgaggattagtgacttgcccacatcatttggggaataaatggtggtactggaaatgaaacccagggcaggctgcctccagggcctgggcctcactcgaggctgtggctgcaggctagaggccttgaagggacacaggttcttcatgaccctcctctcctcctcacccttggcagtattcttactagaccacaagtgcctgggggatcccaggacccgcccccttccaccgtcactcccagcctgagcctgtcacagctctgtccacagtgctgctggtttgtcacttcccagtggctttgaggaagtgccacccccccacccagggcccacccgagaaagtctccagcagtgaggtcccctgggccagttcggtgggccaagtcctgcactctgtgcccacaccgagccctcctcggggctggcagctcctgccgtgctgggcacttgacgggcaccccttgctgcatccccagcaacttggaaatgcagagtccaaaacgcctgaagccagggcctggagcctctgctggagcaggctggcatcccaaggggaatgtccccaaggggacatgcaggcagacaccctcaggagcacagtgacccaaggtcagtgtggggagatcgaggaggggctagaaggaggaggacccaggtcccaccgaggatggaggcaggtgttggggaggggtctgctgtagatggacaggattttactttccgcgtgggtgggcctgtgctgggggccccggggcccagggttctgagtaggaacacagacctcacttctgaacccctgcctctctgcaggtaccccagacggtcagccacagcctacccagcctctccccactgtgacgccacggcggccaggccggcctgaccaccggccgccccggcctccccagccaccacccccaggtgggaagccagagcggcccccaaagccgggccccccagtccagccccgagccacagagcggcccgaccagtatggccccaacatctgcgacggggactttgacacagtggccatgcttcgcggggagatgttcgtgttcaaggtctggccccgcctcccatgcctggccctgagccttttccctggctgctctgggccccctgtcccaccctcactcagcaggccccggggagccattaagccctcagctctagatggggaggaatccagcccaagaggttgagggacttgcccagggtcacacagcaagccctggtgccagctccccagctcagggctctgtttctgtgcagccctggctttccaagccactgcctgcctcagtatctcagtgtcctccccttgggcccaccctcacctgggaaggggtggtttgaggatggcacctctcccggccaaggcagcttgcctgcgctgcccgctcacactatgccctccccagggccgctggttctggcgagtccggcacaaccgcgtcctggacaactatcccatgcccatcgggcacttctggcgtggtctgcccggtgacatcagtgctgcctacgagcgccaagacggtcgttttgtctttttcaaaggtgagcagaggtagggttagagggttgggcacgcctcctgccatgacctctgaccctgctggatctgagagaagaggaggtgaagggttgcattgcatgtctggtcctgtgcccccactgtgggctcactctgggaggatgaggacacagcagcaaggcaggacgggaggaagatagaggctggaggcagggttggacctgcaacccggaagtgcctggccaccttgtgcagcacagggctcagccctgcttccctctgtccttgcctctttgcctcctgcagccccatcctcataagaacaggtgcccccagcccactccggggccagatttctgtggtctgtctgcagagacgaggtcttgcagggcagcgccccgtgatggatccaccagggctctaaccccactgtcctgagcttcagtgaggcaggagctccctgaggacagggctggcaccaaactaaaagcagggagccctgggccacacactgtgagggctgcaggtgtgctccagggacacagcccccagacccagaggccaggcagtcccctccccatacaagaactatatgtgcgggggtggatgtgcacatggaagcgagggctgtgggtggcatgtggcgtgtatgggtgtgagcgggtgactcttgctcacgggaacaagtgtgcctcaggtatccatgagtgcagcatgtgatgtgcgggtgacctcattgtatgttgtcttgaatatgtagaggggtgtgagtgtgattttgtgggcccagaagagcattcttttcccgcacacacccctcagccccaggcctgacctcactgtgcctgccacccctcctgtaggtgaccgctactggctctttcgagaagcgaacctggagcccggctacccacagccgctgaccagctatggcctgggcatcccctatgaccgcattgacacggccatctggtgggagcccacaggccacaccttcttcttccaagaggacaggtgagcagtgcgtccctcccctaaggggagaaggccccatctaggcccccctcaacctcaggcctacccagaaagaatccactgcctgtggggaacgggtcctggcccaagcaggatctctaggtccacagcctggtgcttttgttcacaggtactggcgcttcaacgaggagacacagcgtggagaccctgggtaccccaagcccatcagtgtctggcaggggatccctgcctcccctaaaggggccttcctgagcaatgacgcaggtacctggccagcccctcccagtttgcccagcacctaatatcccctgctacacacaccacagggcagggcttgcccaaggtcacccggcactgtgatggtgtgtatgggtgacaagctgtgtcacgctctgggctgggagcttacctagcttgacaccctggtccttcctgcatagttaaaattccctttttacagacaggcaaactaataaaccagagagcttgagcagagtgccccaaattccacagccaggaaggtgcggcgtcaggattccaggccagtcctgcctgcgtccggagctggagcttggaactgccctgatgcccacagagtccagccacccccaggcaatcccaggggagccttgagcctgagtggggcaggcttggctcagagtgttaggggtgaaaatcctcccagggcatcactcatctacctacaaggaaagccctgtctctgtcattataaccaagagacagggagctgtgcctcttctgtttctctagcaaggtctctagtgcatttaagaaaaaccagccaggtgtagtggctcacgcctgtaatcccagctcttggagaggccgatgcgagaggatcgcttgagtccaggagttcgagaccagcctgaataacatagtgagactctatctctacaaaaacaattttaaatcagccaggtgtggtgacttgcacctatagtcccagttatttaggaggctgcggtcggaggattacttgagtctgggaggtcaaggctgcagtgagctgtgatcgcgccactatactccagcctgggtgactcaggggggaccttgcctgctttgccagtgctcaggccagttacacagcttctgtatgtgagcttggcactctgcagccgctctgatctcttgtgctcaccccttgattgaaacctggccctgcctggtattgatgggatgctggcaaggtgcccaaggtcagagagccagcccaaggcagcaccaggttccttccgctctagaacaactgcggggtgctgtgtggccttgagcaagaccccaaacctctgtggtgtgaggtgaagccagttctgggaaggggcagcaggatccctgactgcagcccccaacccagcaggctataggacccttccaggcccttccccagctaatgtcagtctggtcaggaagcccagggttctagtcgtacccttagcccaaagccctctgagcctcagtctggctcctgcaagttgagaaggggcagatttgaaaatactcagggaagcaaatgagaagaagggtgttttgaagccctcagcatgtcctggcctttgatggttctcactggtggttcggctcaacctgaagccactctggcctccttgcccctgcagcctacacctacttctacaagggcaccaaatactggaaattcgacaatgagcgcctgcggatggagcccggctaccccaagtccatcctgcgggacttcatgggctgccaggagcacgtggagccaggcccccgatggcccgacgtggcccggccgcccttcaacccccacgggggtgcagagcccggggcggacagcgcagagggcgacgtgggggatggggatggggactttggggccggggtcaacaaggacgggggcagccgcgtggtggtgcagatggaggaggtggcacggacggtgaacgtggtgatggtgctggtgccactgctgctgctgctctgcgtcctgggcctcacctacgcgctggtgcagatgcagcgcaagggtgcgccacgtgtcctgctttactgcaagcgctcgctgcaggagtgggtctgaccacccagcgctcctgctaacggtgctcagggggcgcctgtggttctgagatggctcccaggggctccctccgcccccaggtaggggcccctctcagccctcacacaccctgtctgccccgccctcattatttatgtccaggtgtttgttttgttttgtttttggcaccttacttgaccatttgtttctgtttccccgactggggcagggtgtttagaattttctaaatgtagttctgctccagacagggaattaggcccccatcatcctctggcttggccacagccaggggagcagaggggcagaggcccacattggaagagcagcacctcctcagcctgaaccccagggctgtaactgccaggctctctttgcccagttggagactgtctggcccccctggtcccctccttcccaagtgagtctctctgggccttaggaagagccttccacccaggggcagccccaggccaaaggggacctggaagggaggtgggccgtggcccttgagtccccattgaggcttggttccttcccaatccagtggacttcgcagtccacttctgacagcctcagtgaccctggctccttgtgccagagaacccagcccacccccggcagcagcccccagctcccacctccccttgggcccacacctccttccctctctggagaaagggccctgggcctgcctcaccacggaccaaagggagtctgccagggcccctctccccagggaagcagcagcctcgcccctggcagagatgcctccctgagctagaaccctctgttccttccctgtgcctcctccctccctctccgactcacaccactagcctcaggggtctgagctccagctcctttgggcttcagctgccagtgtcctgagccccagggagagggggctggtgggtgcctaggcctgggcagtggatggccgtgaatgggtgcccacagtgtcaggcactgggcatgaggggttcctcccctccagctccctgtgcccccagggtcctgggaggagagacactggtggggataggccagccgcgcatcagactgtgaaccccacgaaggagcccattgtggcctaagaggctgccctcctgtgctcagccctgaggacagatgcctccttcctcttttccttcccaaagcaagcaagaggccgtggctgctgtgggaaatggtactgtacagctggctctacttccccatggccctgagcgagtggagtctgccacccaggatccccaaggcacttgagggggaaggattctgctggcctctgcgagtggtttcttgtgcactggcaccaagtgcgggtccggcagcttctgccccctgcagaaccggagagccagctaaggggtggggctgcgggggttccgtgtccacccccatacatttatttctgtaaataatgtgcactgaataaattgtacagccggc

SEQ ID NO: 103 - DNA, 65558 bp, Homo sapiens
ctgaaataatataaaatatttaatataaattgtcaattataatgactggcataaggtagaattacaacaaatgctaattatatttgcttgtttgaaaatttaacactctattaaaaggcaaaaaagtgctcacctgcaaatattaatacatgccttctgtttagtccatagaaagcccacaagtaagagattcaaaagtgaaagctatcacttacagaagattaagaatatattgcattgagaagatagggattaaggagtttatcaaaggttttttaaaaaattattttcctgaacatcatttcaagaaagataagcgccaaagacataaatatattctccagagcatgtgcactgcaagttgacaaatgtgtctcttttatagagtttggtgaaggttattcattttatttttcctgtcttgaccagaaaattgtggcttctcatcatgtatgactgcctgcagggtcttctgaataggaaattaccaatgctgaaatttgtatgacttaaataagtgttgaagtgtgggggttgaaaggagatacatatcagagacatccattcagttaatagaactaagtttttgatttgcatagcttatatctagagcattgtgtttcttattttctatattactatcttctctaactatataattagcacagattgaagctataatggatttcaataatagcactactttagaatgatgtatacgtctttaaatcttaagacaagcataggaaatatgtatattcttaaaaaaaggaaaatttttttaaagtttagagttaaaagaaacatgcattttctgttacatttcagattattttagttaaagaatcttctatgctttttttcttcattcttagaagactacctgcaattgtaaagcatgaatcctgtaatacttctgtaaatgaatcactattgcatttataccattagcctctgaacagatttcaagttgctgctgccaactctcgcgagctttgtcagtaacagttgattgttacattcagtaacactgaatgtcagtgcagtccaatttacaggctggagcagcagctgcatcctgcatttccccgaagtattacatgattttcactccttgcaaactttgccatctttgttgcagagaatcgggtaagttgctctgaatttacaccttcgtgtagagatccaagttactgtaaagctcattctgtgggatgagagtgatctcttcatgtgtttgttgtgtccctttggtgctctgtggggaacagttactgaagcttgcaaatgggacagaggaagtgagccagcaggcacatgcatcaaatcttcctattattcagggaacgcagactttgtttatttaactgctgagaaaataatgaatttattcaactctgtataaaggaccatagcacgtgtggaatcactgtgatatatattcttagtgagtttcctaagaaaaaacatttcatactggcttacccttaaatgcattgtttattgaatctctctgtaaaagtaatctttgattagtcttcctttttttttctttttaaatgggataaagttagtagttaacttactttttcctgaacaaaatacttttctcaatcaacattttgtcacctaaaactttaacagtaacaactggcaaatgagaggtctgtttattttatgtaaataaaaacaaaacctgttttctaatttgatttacagtgatttatgagcgtgtcccctttgccctttgtgttcactttttatatgtttgtttaaattgtagcaaaatattttacatttgctattattttactattatagaaatagtaagcaaatgtactttctgctcatcctataatcttgtaaaactattattttgataacatcagttccactttaaccagggaattaaatattaaggattataaaatctatgaatgactaaaagtaaactgaaatgtgatttcattgtttatgatttctatttattatatatttttattttatgagtatgtcttctacatttttatgaatatatttcatgataataaactcaattaggagctcctgtcactagtctgtgtaatgccttccttaatataaactatctcatagttacaataaatacaatgacagtttacttatataagtagttactttgtttaaggataagcgtgagcttttaaagtgtgactttaacatttgaataaaaatcttcagaattttctctggatataaaataaagtagtcttttggatgccaaataaatttctaattgggttatcaaagttctgttttgttctcctaattttttgttgttgttgtttgtttgtattgtcctagttttttaattgtaaaaatatgtttgggatgtattccatatttcatttttataaaacataagctactaatagctaaacaagtcacatcttatctataaatttggttccttcttcgagtcatttcttgataagtataatatatatttacattgaatattatcttcatttcgatggtttcttgccagcatctgctcattcttaccaaaattagacggtcccagatgttaagagaattgtaattgaatagatagcaacctaagaggagatttaattttcagagaagactcaagaaatctctctaataaatgttcaaattattcacacaatgaagtttgcaaatgttcttcctaattgaggacagataaaacatcttaagtttcttatatctaatgtagtgtcttctatatgtatacatgcctaaagcatagctgaagaatccctgaaagacagtgatgtagtctatttataatcagacttcctcaattccccacttcacttagtctgcaacaaaacaagctttttaagtttgatataaagacgtcgttgttccaatttcttcaaatacatttaagagagcttgttctagatcatattaatattatctagatggctctttctctaccattttaagagggtttatttccaagtagaaataaatatttatttaattgtaactttttaaaagatagggaaattatacacagggaaaatattttgaatatttgcttgaacatcttttaaaaattcttggcttgtcccttattttgaaaatctggttgatattcaagtatcccaaaaaatagctctttatacaaattattttatcacactcacatcttatagtataacatttagtattttttgttaaaatcagctagggaatattaatagtactttcaaaattgaattaaaaatacaaaaaaagatttgtcaccttttttatttgaaagttattgttataacagtttagcattttcaaaaattgccagtaaattttcttaattccaaacaaaaactcagttcctcaaaaactcaaattcctcaaaaactcaattcctcaaaaactagaatggtctgaattccaaacaaaaactcctgtctttatttccaatattaaatactattttgataagcaaattgatctaaattcagatacacagctgtatttgtgaaaatgtgccccatttttatgataatgtttatgctactatgttctctcagaatcatgtgagacagtatccaattgcaccagaatttattaaaagaaaaacgatcaaacctgcacgttgtgcacatgtaccctaaaacttaaagtataataataataaaattaaaaaaaagaaaaacgataatgttttgttgaatatcctaatcattaataaaaattttgagatatagactcaatatttttattctattttcatttatttctctttcgattgctcaattacatgataaacatatcaaaatttttaaagtcttttaatggcaaaactacagagtagcatgttagaatagataataccagattataaaaagggcaaagtgatgcttatttaaaaaataaagtactgcaattaaatataaaaacattagcctacaatacactaacagtatatgaacatctgcatatttttatattaaagtacacattaaataatatgtcatatgacactctgcaacaatacatatgagttagcattatattgtcatttttgcaatgaatgcatgcttacaagaattgctttgattgttaccaattacattatttgcaagttgataactcagatatcattatcgaaaaattaaagattttaattcataccatattattatataacaagacctactcagcataaaatataaatatcaacatataataaattttgtattaaatcaagttaagtgacatgggaagatattacaaccatttagatgttatagcaactgtttaacataaacaatgaaacatcacatttcataattacacaaaacacaaatacagttttgtagcaactatagtacttgctttgcaataatataaactgtttgtagaacaagtttgaaaactatcagagaccaaaatttatttcaatttggtgtttggtttctaaagacaaactaatattcaaataaaatcaaggaaaaaatagatggcttttgcattagacttagaagaacattgactgagctaggcaagagggagaatgggtacaaccagggatgatgcaattaatttattaaattgcagcttagaacgaaccgcccaatcagctttgcaccttattcactttttcttcccagaggatgttttcaaaacagaaaataaaaaaaatcatactagcactttgtttttctccagatgctctcctgcatttattaaagagaaaaggattagcggttatcagaaagaaaaaagaactgaagcagtagagtgcctctaaaactttgattatgtctgaaatgttattagtgtcaggtaacaggaaactttaagtcattgttatattttacttatttatttactgtgatttatgatacagtcatacaatacataatgatgcttcaatcaataatggtggtcttatacaattataatatagtattttcactgtaccttttctctgtttacatacacatacagttaccattttctaacaattgcctacagtattcaggaacatgttatacagatttgtagcctagatgcaacagcctataccatatagcctaaaggtgtggtaggctatggcatctaagtttgcgtgagtacacttataatgtgtgcacaatgattagatcgcctaacaatgcatttcttagaatgtatccctgtcaataaatggcatatgacaaggatacattatataatagtacctaaattatatataatagtacctaaatatcatgaatgtagaaatgctgctaaaaatatattttaattatgttttattgatcttagcacacatctaattgtaccaaacagaactgaaaaaataataatcttgtggcttgatttttttaaaaccttattattatagcagtcattttatatgtaaatatatatgcatatacatatgaatattgttagaattagatatagaaatagatatatccattaagtatcaagccctgaaccaaatgctccagaccatggattaataaattgagatatttattgggataaaaaatacttgtaggtcactagatatcctatgaccattggtgaattaggctgatttgaaatatgataccctacgtctgggacataggcattagaatagttatttattctctttctttgagaaaatctaaattaaataaacaaagacaaaactaatacaaatgcttagtatttgtaggattcgtttattggttgtgtaggttggatttcagcaacctaattacagcatgagaaaaaataaagggaaggctttgtacattaatggatctttgttattattatgtgaatgagaatcagtatttgtaattgactattttagttatataaacacattagttcttctatggccgggcgcggtggctcatgcctgtaatcccagctctttgggaggccgaggtaagtggatcacttgaggtcaggagttcgagaccagcctggccaacatggtaaaaccccatctctactaaaatacaaaaattacctgggtgtggtgccatacacctgtaatcccagctacttgggaggctgaggcagaagaatcacttgagcccaggaggcagaggttgcagtgagccgagatcacaccactgcactctagcttggcgacagagtgagactccatctcaaaagagacattagttcatttaaatgatatttgcatcacattttgctgtccctctttgtcacagagtttccaaatctgatttttaatttcttttttattgaaaagaaactcacatctgcattatgaatttctgataaaacttagatctcttctaatagtctatgtcatccattaaatattatttcataaatgtcaaatacttatgattttgtaggtcacaaagattatttttgcttctgccatgtggcccaatagtttctaagctttgatcctctaatttcagtcatttttttcattataaaaaatgcaaataattctgactgtgctaacacatttagcttcactagttgcatatactttaatctgttaacaaattgctataacaaatatgaatacatattgagtaatactgagtataaaattcctcttaagccacaatcttctcccagacattataatgctagcccctggttctctctattgacattataaatctggtaaagagtccctcatgtttattaaattttggagaaattacctggaatatatcctcagccttcgctctttattttttccatagcccttactagtggtagcatgtttgttagtttttacaatttgtagaataaatggtgactaccatatatttgttacttaatattctgtgaataaattgtctaaattctcttcagtttgtataataggattgtatagaggaagatgtcacttggcaaaagggaccacagaaaagacaaggaaaacagaaaaggacaataatgacaatctattgatccttaaaagttcttaacctacttaacaattctgccaagaaccagccagtcatgatatttcagagaatatatgaacttgtattttctcctcttaccaaggcagaaattatatctgatgtaggtagactactgtttactgcttttttggtggagctgtacatatagtcagaagtaacattaaatttggctaggacaaacattctatttaaaatactagctcttccttacaaagatttgacaataaatatccctaaaatgaatattttttattttccattccactatttttttttctaaattgaaaactaaaatatctctgttttctattttttcctatgtaggcctttacagaagcaggtttatttgttttcataatttgtagaattactaacgactatattttaggtaattatcatcaataaagtataatatgctatatgcagaaggcttataaaacattatacttacctctctttcagaaatcaatatgcatagcaaagtcacaatcatatgcatcagatttctcttttggtttcttttgctctgcatgcttattgggaagtcacatactgaagatgacatcataattgcaacaaagaatggaaaagtcagagggatgaacttgacagtttttggtggcacggtaacagcctttcttggaattccctatgcacagccacctcttggtagacttcgattcaaaaagccacagtctctgaccaagtggtctgatatttggaatgccacaaaatatgcaaattcttgctgtcagaacatagatcaaagttttccaggcttccatggatcagagatgtggaacccaaacactgacctcagtgaagactgtttatatctaaatgtatggattccagcacctaaaccaaaaaatgccactgtattgatatggatttatggtggtggttttcaaactggaacatcatctttacatgtttatgatggcaagtttctggctcgggttgaaagagttattgtagtgtcaatgaactatagggtgggtgccctaggattcttagctttgccaggaaatcctgaggctccagggaacatgggtttatttgatcaacagttggctcttcagtgggttcaaaaaaatatagcagcctttggtggaaatcctaaaagtgtaactctctttggagaaagtgcaggagcagcttcagttagcctgcatttgctttctcctggaagccattcattgttcaccagagccattctgcaaagtggatcctttaatgctccttgggcggtaacatctctttatgaagctaggaacagaacgttgaacttagctaaattgactggttgctctagagagaatgagactgaaataatcaagtgtcttagaaataaagatccccaagaaattcttctgaatgaagcatttgttgtcccctatgggactcctttgtcagtaaactttggtccgaccgtggatggtgattttctcactgacatgccagacatattacttgaacttggacaatttaaaaaaacccagattttggtgggtgttaataaagatgaagggacagcttttttagtctatggtgctcctggcttcagcaaagataacaatagtatcataactagaaaagaatttcaggaaggtttaaaaatattttttccaggagtgagtgagtttggaaaggaatccatcctttttcattacacagactgggtagatgatcagagacctgaaaactaccgtgaggccttgggtgatgttgttggggattataatttcatatgccctgccttggagttcaccaagaagttctcagaatggggaaataatgcctttttctactattttgaacaccgatcctccaaacttccgtggccagaatggatgggagtgatgcatggctatgaaattgaatttgtctttggtttacctctggaaagaagagataattacacaaaagccgaggaaattttgagtagatccatagtgaaacggtgggcaaattttgcaaaatatgggtaagtgctgatttttgtcattgttctctggcttggtttgatccgttttgcttagctttgcttggtctctggggtagactttagtataaagacacagaaatgttttaattatttgttctatttgtaccaaagctggttttattttttcttatgaactgcatttcaactccctgtgtcagagtgtttaaatcatcatcttagaaattttataaaaaatatcttctgatttcatctccaaaatatttcaaagtatttcaacaatgttagccaaagtttttatagaaaaagatgcttagttggagaactaaaattaatgtgagaatactttttaacctgcaagtttacaatgttcacagatttacgtcagagtaggactatttcttcccaagctcttcagcttggtaccatgatacctgatacatgaagtaatgtatctctgcttaggaaattgaagggacatgatggtgatgcagttggccctcagtttacccaaaatatacatttgccattgtattgtttggtttttctttttttcctaataggcctgatcagatttgaggcagcctgtgtttgactggggccatgaggttttagctaagccgttctccacctgagcagtcttatggctgacattagataatcagagacattacaaaaaacatatttcccccatatattataagtattgtgatagtatgtccaaaagagtcagaaaaaataaccatttagaatatattttctaaatatgtatgtgtatctatagaaaataaagtagtttttttttctcccactacatttgtaaaccaaaaccacattttatacatgggagtaaattgcaccaatgtgaataatttaaaaaaaatagaaatttagaaatttacttatacaagaaatgtttacataaatcataagttgattgattcagtaattcagtctatcacactatcttttataactaaacaaaatgccgatagttacattattgctttctggtgttcttttccaccctccatttggaattctttgtatttcatgttactgtatgtatgtttctacaatatcagttgtacaattcttttcaaaatggtttaatacttattcactgtggataaagttataattcttccacctagcattaaaaggcctctgtaatcttgctgcaactcacattactcagtaacaccaggttctgggtaagccagttatctcactaataccaaagattctgagtttaactgcaccttagaactttcttctctcaatgtgccctgtttagaacacctacctctttcctctttaatgacaaagtcctacttttttaaggtcttaatctactacacatctcatgcaacatttctttaattcctagagttgcaattgcttcagacttcttgttcactctcacagaagttgactgtaacttgtctatttcctctttcattgtaagctgttcttcctcaaccatactaaactacgttcttgaaacagaacctgtggttttgatttgatattcattgaagtactatgatgggtatgtatcatatttaacaaatatttggctaatgattgaatgagagctggtaaaagatagtatgagtaaaaaatattatattgccttttcaagatatgtgggttattatattacccgtagctgtaaaatattttattccttctcaacatcagcataaatttctgctcaaggaaagaacgatcagcttatttttagaggtgtattagaattacttatatctcattctgctctctccctcaagactttatccatattacatcatttatatatgtttttaattctttctttaaattctaggaactgtaaatcatttaaggatttaaggatgatttttgaaattattgaaacctaaacttttcaaaggacttcatttttttgcatgttgcaatcattgaggaatttatattttctcatttcacaatggagaacacaaagaatcagatgtgttaaatgccttgtttatggcacccatataacagaccaaagaagaaaatctttgacacttaataggattatttaatacttaattatttaattattaattaattaataaggttatttaatattaaccttataatgggaaataaataaaaattgacattttaataataataatacatatatgtcatggagatcataagctataaagagttaaactgtaaagtagtgtggcaataacaagatgttattttagtaattttatttgcagacgatatttgcacagttgaacagagataataacattatatatttgtgttaagggttgatttgatgtcaagcataatgttaatatcctgatgttcgttatctactttcaaagtatacatgcgaattaatatagaagctttgaataattaagtgaacggcagtggaaacaaagttgataactgttaggtctggaaatctatccacatctttctgaccacagacttgatgtcccaaatctgtaatttccaagggcaaagactttcctcctaggcccctttctttctacccaccaatgacatttaacaatgtctggagccctttttgagtgtcagtactagggaaacagatgataccagcaaggtaaaggcccagcatgctgctaaacaccctgtaatgcacacggcggcattccacaatgatataattattcattccaaaatgtaaataatgccaaggttgagaaactcttctagtctctacttcctcagaacttcaaaatgtcttattaaggaagtaaaagtagaattggagctgtaattatcatttaggaaaatgagttttcaagttcatgattcatgaaatgttttaataaattcttcttaattagtaaatctatgtctactatttataatcttcattgaaatataatgtacatactgtaaaaatatacacaataaacataaagatcagtaaatttttaccaatatgtacaactccataaagataaagcataattccattgcctcagaataaagtccccccccacctctttgcaaacagccatcttactccccatgtccagtcaatcactgattctatttttattatagattagttttaccttttctagagctttatattcatggtatcatagcctatataatcttgtgtctcgcttcttttgctcagcataatagaattgcaattcatctgtgttgtatgtgtaaagtagtttatttgttattcactgctaagtgctatttcctatggatgattgtaccactacttgtttatccattcactcatacgttgtttccttttggggatattatgactagcattctacgaatatttttctggaagacttttgtcttgttgtagaagatgttttttttctcttattttgagtaaaaagtgagaggaattgcaggaacacatataagcacatgcttattttttttaaagaaactgttcaactattttccttagttgagaattttatactcccaaaagcagtgatgtaccagagccccacttgtttcacatcttcagcatcacttgcaactaatcaatcttcaattttagctgttcttctggctttgtaatgacatctcattgtgcttttgctttgtttctatctgatggatatagatgtgaaacatcttttcttatgcttactggtcattggtattttttctattttgaaatgtttaagtcttttgccaatttttattgggtttatctctcattgacttgtaagaattcttatattcataggtggaaattgaacaatgagaacacatggacacaggaaggggaacatcacacaccggggcctgttgtggggtggggtgagcggggagggatagcattaggagatatacctgatgttaaatgacgagttaatgggtgcagcacaccaacacggcacatgtatacatgtgtaactaagctgtacgttgtgcacatgtaccctaaaacttaaagtacaataaatataaaaagatacatatcctatgtattttcaatattttctcccagtttatatcttactttgatttttaaaatgttgaatttcaatgaatctcagcttattaatttatttccatcttatcaaataaatatttccctacaccaacatttgtgaagactggtttttttttctgttttcttcttgctttatggttttagctttttacttttgattcataatattatttacattcatatctgtgaacttttaatgtaggcattgaggttcattatttcccatataaatattcagatactacatcactattctttagaaaagacacttctttacttactaaattacttaggctactttcttgaaaatcaactgaccatatacgtgtggatatgaatgagtacattttattctgtcccactaaatggtctcatgtctattcttatgccagtactggagtgtcttatatagtatgtctacacagtatttttttaattggagagtttaaaggagtacactatgttttcacaaacaaaacttttgatttgaaaaaaaaacagttatgtctattttagttttgcatttccaaataaagattagaatcagcttctcagttttcacaaaagctgattaggtgttgaaatgattgattaatgtaaagagaatgttcatattaacattactgcttttaaatccatgaatatggtatacctttccttttattttgttattttttaatttatataaatatttaaaagttttacatgtacagtccttggatatatttaactaaatttatccctaacagttttatgtattttaaaatttagattttgctagtatctaaatatacacttgattttctacgtcatgcaagcttgctaatttcacttataaagtttggtagatttatcaattttttaatttgggggttaaataagctattttctgtgaatgatgggggacagttggcttcttccttttcaatatttatatctatcgttttcttgatgattttgttattgcattctctaggattgttagcacaatattaaataatagatgtggagcatatagtttcaaatcttagagggatgagttcacaattttggtattgtctatattaactatagttttgcccttcgtcaaatttaggaaattctcttctattcctatttcttgagagtctttattataaatagatattaaattgtgacaaatgctctttctgcttctattgaaaggaccatcatatttttgttgctttgtcttctcattaattttgttagtgtggtgaattatattaaaacaatcttgcattcctagaataaaaacaactttatcataatatagtgtcattttaatatatttttatattgttttctaataataatataatttattgatgttttcctcttattcatgaaaaatataagtatacaattttgtttattttaatttctttgtaaagctttcatgtaagaataatcttaggctgaacatggtggttcatgcctgtaatcccaccactttgggaagccaaggcaggaggactgcttgaagcccaaagttatagactagcctgagcaacaaagtgagagagtccatctctacattaaaaaaaaaaaaaaaaaagttggttgggtatggtgggtatggtgccacacacctgtagcctcagctacatgggaggccgaggcaggaggatcacttgagcccaggaattcatggctgtagtggactatgatcagggcactgcactctagtctgggtgacagaacagatctcctctctgagaaaaaaaatatgtagtaatcttccttctgcttcaagattttttagtttgcaaaccattgggattatttaagtctttaaatatttaacatatttcgtcaatgaaaccacttagatctggagttttccttatgggaaaatatcttattataaatataatacttcataggacatagagctatctagacatctattccttcttgattcagtagtgataggttatagttttcaaggattatttttccagttattccattatcaattggcattccccttttcttaactgtcataggtttgcattgcccattatccagtttctgaaattcattgccttgtttgttctgtccagtattataattgtttatgatgagaaggctaatctcaccttatcatggatgaaggtgaaagtccaacactttcctctccgttggtattttaagggcatcttaacatttatagatctcattcagttatataaaactcatttttcagttactttataaattatcaaagagatacaagatttttaaatttgatttcttaataaaattaaaggttattttgagctagcactaaaggacatgcaaatttgatgtctttggtttcagtgttttaagatttcttacagaatagaagtcataatataatttaggcctttgctaactggaattgctacctatacatattttacttcgttttgttcttcctctaatgctacctgtagaaatgaacttaaaattttacctaaataacacacaggtctatatgtgcattatgtcttttatattataatatatgtgaaaatatcagtacaacataatacgtctaccaatcacccatccaagaaataacttgatagcgaaaaaaattaagtcaaccagaacttaatgaaatgttgtcaatactatcccagtggtacagaaaattggtgaaattaaacttgggttatgagaaagaccagagcactaaagaaggaaaatatgccaaatgtaattagtaagatagtataaaatggaagttatcattatttcaaaacccctccagcttctttctactcttgcagatgatcttttctttacaatatcctcccttggtgctgtattcattcagagcttcttcagtgtaaaatctcagagagaaccattcacagtgcagttacacagccttccagatcatgtgtgacagccaatgtaatgttcccagtgtcaatctttttacagatcctttgtatatgtaaacttaggtaagctacttaaaattccctgatatttttttcttatctgtaaaatgggaatataaatataactctctcattgccattaaaacttgtcattgacagaaaattgtattccacttctctatttaaaaaagtcagttcttcctcatgctctattctcatctaagattaaacttagcttccacaccaaaaaaagtacaattgtttaatttcctgactcaaaactacttaattaatcaactaagctttcaaataaaggtaaactttaatattgaggcaatttacttgcttctatactttttcattcattcattcattcatagcctcttatttatttatcatttatttattcagaacctctctgaaatggttaatattttctaatgcttttttgccaggaataaatgttctgacatgtcacttttattttgtcctgttttgatatcataaaatcacaagctacttaacaaagtaatttggaagtaacatcacagcacacatgctgctattctcatatcataatattttatttattatttattcccttacactttaaggaaatttatcacagaatgagcaatttattaaacttgaacaaaaatgtattaatacatttttcaccactgaagttaactgatctggaaaaaagtaaatgagaacagttcttgatttttgtaatggggagtgggtaagacaattacatgctaagccaaatgctgttaatacacaaggtattttaaaatgattgggacaatttgaaaatagatattcatctttttactaaattttaattgtaataatcagaaattgcagatttgacagattcctaaaggaatcaattttgtttctgatttgagatacacacacccacactgaaggaagggtggccatacagatggccataacgtcattaaagtacctgaaatacactcaataatttgttctctaatgtttttaatgtaattttaatttaatatttagcatttaatttgtatatttttatatgacacagtaaaaaatggattgaaataacagtattttaacatcacttatttcccaaatgggtatattttcttggtgcgctctctctctctttttttttaattggaatcattccatgtttttaaatgacaacagaaaaactggggaaaggtcaaagaaattatggatggagaaatcgtgctacttcattctaaatgtctgtataggaatttagcatatatttatacttattatatagtatttgtgcaaatcccttcaccaagaaattaatttccaaattataattgaatttactttttgttatatttttcaactaataaatattatagaactttaccacaatacaattcttagaggtctcttcaatatatcaaaataatatcagttaaagatactcttaacatgaacagtgtactatcacaatgacaaggtgtgaggtatatgcattctattattagaattttaaagtgctgaaatgatgagactatctaacttttttaagtgagaaaattgtgttccatagaagaaaagtgaattgcaactaacaggtgacagaacaatgattaactgtgactcaaggctattaactttcatttccttgtattatacattcgccaggctgccttcaccatgaattcttaaaagcagtcattaagtatgcttacaaaatgcatttggttgtaaacttgtaattttaaatgttagcatgcttatacctgcttggttaatgttatagaggtaagggcagagaacagactaaaattagacatcatgagacttagaggcaagtttaagtttgtgagactgtcatctggccatctagtccaattattatcagacttataattagattttccgacagataatagttcacgtggcttccagagtgaagagaaaaattcttaccctctgattctacaattatttgtggtatattatcataattaacccaatggaacattttcatgactttaaaaaagaatcagggcttaaatccccttggatttattttattgttatcataacagcatcaatgttctatcactttaaatctttttttctccttagaaattaatttaggagttactcagaaaagaataaggcaaaaatgccaactgtagtattcctgtaacttaccttaattttaacagatagaatataaatgtaggtttaaaaaaaatggatacccattagtgtaatgtatttgaaaagaaataattgtgttatgagacaatttaaagtgtatataagatcactttcagaaccatttcagagtgcagcaatatttttcaatgaatgacagtggaatgagatagagaaatccgatgtcccccaaaggggcaaatctacaaagagagctataaaactgagatatgtttgatcaagtatttcagaatactctctcgcagtgcagcagaaaaaaactaatgcactcagtataaaatggctcattaaaacatggaaaatctcatttataggatcgatttacttggaaataacctgatttgttttctatgtttctgcacatgttttttagttggaaaaagtataacattcagtccacttgtacatattaaattcagtctaatattaataaatcatttttttagaaatcaaagtaataatttcaggaatgtacacacagatgtaatgcttcaaaagacctgtcagaaataatagcttaaatattgcaaagtaacaaaacatagtaaataaaatgtgaatttatatatttttctgtatggagtttttctgttccacaatcagatatgactcaggctaatgattatttattgaatttagcaaaaacataagaacagaaacacacctaaaatatttttaaaactacaaacacagaagacaaggttaacagcataaaagaaaatagtggtagcagcaaaacagatagagccttaaaataaataagtatgttgattaaaaactattttgtggttaacactcttctcattgtataaaccatataaaaagtagtgtcacttactggtaaatgcatttatgaaggaatgtacttcctagaaaagaattggaatgataattttttaaattataaacacttttaagagatgtaatactatttattttaattacttttaattctaaaaatgttgaaataatcccagttagaagttaaaaacctaggccaggcatggtggctcatgcctgtaatcccagcactttgggaggccgaaacgggaggatcatccgaggtcaggagttcgagatctgcctggctaatatggtaaaccccatctctactaagaatacaaaaattagctgggtgtggtggtgcacgcttttaatcccagcaactctggaagctaaggcaggagaatcgtttgaacccaggaggcagagaatgcagtgagccaagattgtgccagtgcactccagcctgggcaacaagagcaaaactctgtctcaggagaaaaaaaaaaaaaaaagaagttaaaaacctaaacacacagtacttaagaattaatttttttgtttattttttcacctccaaagaaaggccttgacttttaattgaatttccaacatagcatgatgcatcaaaagagcatggcattagaggaaaatagcttgattttgaagccatgtttgccacatagttgccaagttaattgttccctctatgtctctatttctcttataaaaccttcctcacatggttattgtgaaaacttgcccagtgaataatacgtatatatgtattttattgtagatgcaaatagatctgggtatacctatagataagtctgtaagcaacaactagattggtaataggatggtattgttgttcttttcactaacgtctcttcctctgcttcatgatcttcgtgttggtagtttccatttactagatgtttcagtaagatccaagcaagagtctaaatattccagatagactttgcatgtagtctttacaaccactctgtgtaaaatgcattaatatccctattttacaaagaaagctactgatgattggaaagtttaggtcacacaactaacatttgtctttaattttttaatttttaatttttgtgggttaatttttccacctgcatgtcttgatttaaaaatgatattttaaattatggtacctaaaataatgctttagtagtcctaaaatcagaaaaacagtagttaaatataagaatatattgttggcagaaatatgtctcatcctccttatgaagttaccattctcagtgtactaggtaaactttatccaaaatgacattttataatttctaatttcaaaatctatttatttattttatagtttatattatatgctttgtttcatattttgtaattatgtatttatataaaatgtgaaaaataaatttgatcataacaatttacctgtagctgtaattataaagcagtataaaatttaataaaacaagatgcttctgattcttcagcattccctcagatagacatttttgaatgaaagtcatgagattgtttccaaggtacactgcttttaaaatcacaagttattaaataatacttttcagtataaaataattatggtcagattgatgagttttaagaaattatacctgctgcaattttccttctttagattgtaaggcctttgagggtaaagattttctctctgttctccatgcctcactgttttttatttgctttgttatctttgcctatttatgttgtgtttactgctgcatccctattacctcaataatgcttgatgcatgtgagctttcaaatatatttgtgtgttatcatggtgagagttctggaaaaactataaaacacagaagcatagagcaagatgcagatagaatgtgttatcatttgtaaggcggtcacgtaaagcttctgacaaagttctattaaaatagagggacagagtaaatcatgtgaatatctggggaaaaattttcccagaagagagaacaacctctaagactaaagtatttgggatgttgcaggaacagcaagaaagatagtgcggctggaataggtatgtgaaggggaagtgataagaggtaaggtcagagaagtacaaagagccaagatatatgatttgaagcttggatgagtttctgaaatctttcctgagtgagacatttagttatgaaatattcaggaatttgagtagcatattttggctcaaacattataaagaaatctctgactggtaggtacacaagcatgaagtgtacagaagaactaggaggttattacagcaatccagttgagaaatgatcatagattaggtaaaagtgggaaaaaatgatcagaatcaggttatactttgaaggaaggtctgacaatatttgctgagatattggatgtggaatataagagaataaattgggacaaggatactacactgcaaaattttttatttgagccaccagaagagtagaggtaacatttcctgagatattaacaactattggaggatatggttgggagagtgaaatcaaaagttctatttcagacatttcaagtttaagggacctgtttttccagaaatatttaaattaaattgtttaattcatatttaaatttttattgtgccaagacatctgaaattcaagggagaaaaaggggctataaatttggtatctaaaagtatgaagatggtgtttaaagctatgagacaggtttatttcacttacggaggttttagataaaacacatgtctaagcacctcaaggttagagggagggaggaggaagaaaaaactgtagagagagaatggagtagccaaatgaattggagggcaactaggagaacatggtatccactcaagactaaataaagagaatatttcaggaaaggagtatccgtatagaatatagaatgagtacaaagaaaattatgtgaaattgtgtatgattgtgggtttggaaatgtggacatattggtagcaaagatgtggtgttttgatgggatggtgggaactaaaaccttaatagagatgcaaaagagaatgagaggagaggaatcagtaattgcaatttgaggcaactctttcaaagagcattactctaaagtggatcagggaagtcaactcaggggatggctggacaagagagggtagaggtgttttcgattggccttgctttttcatggggaatattgcaacatgattgtgaactgatgggaatggtacagtgattataatgattaatctggttttgtgtaatcatcaactctatctacttaattttatttactttccttatagaaaactatcctcataaatacaatgcaaaccacttggttagaacttaggtcatcagtaattaagactatgtggatctaaaataaaaggaatcaagagacaggtagcaaagagaaaaacagacaacatcctagatattctgaacatcaaaaaagtatgacaaatgtttctttgatatgtattccatagaaaaggtcatattgaaacctattgacttgtactgtgccctaaattttaagagaattactcattgatttttttttgatgaaagacaaatcagaaacaacaattttctaagaaggcataggcagaaggcaagtaaccttacaatagaactgagaggtcacagtctaattgcatgacaagaaagcgggggaaaataacttctcataagcaacctggtataagtagtgacaaaatattgaccctagaccacaaaacatgtacgtgctgctctctgtgtgtccttgaacattcatagaagtattatgtaatgtctaatagaaaattaatctgttaaaatataatgaatatgtagtaataaaaatacttgtccttaaagaatatacttcttatgtaatatgtaaagaataataataatttagcctattgtatagtcaggatattctaaagaaagtactgaccaggtagcctttggagtcataattttaaatctataatattaaaaattacatcaattaaatttattattgctaacatttgctagctattgctaacatttgctagctccctgctcaggacttcactttcatggttgtagcaattctctaaagaagtatcatcatcctcaacaggtgttgataaggatattgaggcttacagagctgaagctactcaaaattccacagctatcagtgaaaaccggaactccaaattgaactttgtggtgtgatggaggaacccagatccatcttccctaaactttgctccctctctattagaatttttgcgtaccactagggaaggaaaagagcaagaattcaatctcctttgcccttatttttttttttttttctaaaatcaaagtgttaatacctatctccttggctgttatggaaatttgagaaactatatgtaatatgcctgacattattccagatacatactgtaagtaatattgccagataaaatacaggacattcagttaaatgtgaaaaataagctaaaccaggaatatatatatgtaatatacattgttttaaatatataagtatgatactaatactaacatatattggtatgaatataatactaatactaatatttaattataaatatttactaacactaatattatagatataaaatttataattaaatattagtataagttaaaaattagtataaatataatactaattctaacatatattagtataaatatgacccatacgtctgatgggacataattatactaaacattatttgtattttagttggaattcacatttaactgggtgttttgctttgttttcactaaatctggtaaacctaactgcaagttagggactaaagagactaggaagtagccccaaggaacaaaattttgacaaaagctgaaaagtatgtcagacataagtttagagaagttcagcaaagggcccaggagttggtaggcagaaaagaaatcaggccagcaagtgttggaaaatggggactctagggacaagctgcatttctaagatttggctgaattcctgaagattggcccttggctaggcagggctcagcatgcacgtttcaggtttccagtaagtattagtgagctgaggaaagtaaggattaacatcataagagcaaaaactaaactattaacattatgattaaaataaacttgccttctcctttaacctgaatctctaaagctataactatgtatttgcatttattttattgctttggatttttctttcattttatcttcttaaaaaaatggtaacatctggagaataaatatttcaaagaaggtagtcataaaaattttgaatcatattaatgaaccctgaaatagagaatgagaggagaataacataaaccagaaaatgtgttatttgtaaaaccttaaactaattctatttacagcactagactgcaatctcagatttcatgtgcaaattatttattactaaatttactaacaataatcttatatacttagtatacaattaattcagatatcgtaatatgagggatactacctatatttattataatgaaatcattgtggaagtcaaagaaacctaacacttacgaaaaattactgtatttctgggatgtacaaatcctaatcttgctttctccatcaactttggcgtcagatattctgttagttactcagacttacattagagtatatgtaaattaagactttttttaaatctctaccttaaattataggtgatagctgaactggttgttttttatctttcttaatttaattacattatttatcttcctttagtacaatgcagaccatttatatataaagaataaataatattagagtcagataaatgattatctactaaatataaaattaaacctttataattgtcctttgttatccttgaaatttctgcagaaaatatgcttttaactcatacgtttatttttattgtgtttcaacattttttccttcttttctggactagaaaagattttgaagtaaaggaatcgaaatgataagttcaatcacagttgtaacacagtatgcttgtaataaacttttcaatgagatttcaaaaagaataaatattattttgtaaatagcattgactttacaaaatattggtaaaccagaggtttgaacctactttagatatagacacataatcaaatatctacaaatggaaaagaataagatgatgaaaatgcaatatttagtaattttagaacgagatattattcatttaataaggaagaaaatatgagtataaaatatatgattattataaaatagtaaacctaatgatttgattacttaatacctaagcataatataaaaattcattcagcaatagagagatttcaactacatattaaattatcttgtaaattttattggtaagtagtcttatttaatagtatgattcagagcactgtttattataattttgcaacttctcttgctaaatccacagtagtctctaattttatgatattttttctggtaaaaaagttttaaacaattatcctgataggaaaaaaaaggactctcatggaatgcttcaaaccaaaagtaatgatgatagagtaattagaaaaatgtaaaaatcctattgcattatgaaggatattgaacatttatagtagctttcaatgaggacacagagaaagaggtatagaaaaaaattctggaagaactaatgctggtgtaaactgctatggaccccagtcctttaatgaccagactatactttcatatctgagggggcatttaaggaagcacctctccaatactcacacacgattagagtatatgcatattcactgtattatgctttctttgagagaatattgaagcctttttcattatgagaaactaccacattaaaatacagcccaagtaaataacaattatgccactggcaatgaaaaacaacatggaaatttttatgtaaaatatttaattcttttttttatttttctattgttctacagtagttgagttctaaatacaaacaagagataaattttcaaatgaaataaagatgtgattatacagaaaattgtaaatgcccatgctaaatccagtttaagcatggaacactccatttgtttgaaagtatactaaaatcattttattgtttccctatgtgtaacatgcaaaataaatggttagattatcatgccaataagaatagataatgtctaaaattatatatagagtaaaaatgttgataaatacttgataaactgtgtgataaagatttgataaaatacatgataaacgtagtgggacctcaaaaaaaaaaatcaaagactcatgagatccatttttttttccattgatagattgatgtctaagaaatagttggataaggatattaatagtatttttagtacttccaaactgttcagctactgataaaattgtatatcttagagttggtactaaaatattgagaatgcaaaaacatttatgtatataaacttgtttattcctgatgtaattcaggtggtcctccgtctgttcttgaaggtcagtattcacagtctttagtatacagccttcagatactttgagcttgaactaatctacactaaaaggaatctctggagattgaaagatgagacggacagaaaggaacaaaaggagtaaaaatagtcaaaaggctagatatgctttgaaatgggcttctgtatccaagtctttctgacaccaaagcccatttctttttactagaccacctagctaccttgtcactctaaatttactgttttgattattatttcttaatcctcactgggctcagtacttattattaataatatttctgtgtttaggctctaactctatgcattaggaaggtaaaactatggttatctgtgtacactatcatcttgctcaggaaatattattctaaattattatattgttttatttgaaatttataaattaaaaatgtaatactgagaacagaattccaaaaatagaattttctaagagcaaatcaatttttgtcagttcagtgttttttggtagacacagagaattcagttattcctagagcattaccattgtctgttcatgcaaaacctcccttatgtttaaaataattttattattttttcatttatcacacattctttcattccacacacacacttacactgctctcttaggcacatctacatacaacttgttatccatccatgaatatgtaggtaaggatgttttcacttttttatcagcctggtttccttaggtatcaaatgtaaattcagatagaagaagccttaaacatgcacctgcatatgtagagatcatttctaaatttaacctttctgtcaagagtctaactgcctacaaaatggagcggtctaatcctcaattttaaattcacctataattttactttttcacttctgagcaagatagtttcgattcttgggtgtttatattctactaattaaaatataacattgctgctattttcatgactgattttttaaaataaagatttcttgcgtcttaaatatcaattaggtaatgcagctctacttgtatcgtcactgtgcaataaatttcagtcaatttaacgtataactccaataagatgtagaagaaaaaggatacttcactccactacgtattttagttagagttgttatatattaatcttgagccaaacctctgttcttagaaaagttccccatcagttttatcagctggatatgtcatggtgtgtcctttgagatgaaagcaccacaccagttcttcatttaacagtatactaaagaccaaaatattttgaaagaaaatgaaagagtaacagcaagcttacctcaaacactgctaaggaagccaatgttgaaaaacttaccattcatttcaaatggaggaacttaattctccagatagccccaaaacagagctaacgaacacaatgcatccccactcccagcagcacgtcgactagtggtgtttgttttcatatttcctatcatgtttgtcatgcctttagtagatgatttggctggcacaatatcctagcctagcctcagtgtagaaatctggcaataaaataacacatccaaagataaaataagaaccaatgttaagtgatgaatccatgcaaagtactcagtgaatctcttaaaatacgcctatctgcacacacaggaaggaaatggatgtgctgggaatctgcattcttctggaacaccatatgtaatgtctattgagatattttgagtgggcataatcttcctaggagggataatatggaaaactttcacagacactttctgtgaactagaatctgctgctagaatatcacaacttgaacagaagaatatccttacctcacactgggtgtaactgaagataactaacacttgttatcagatatttatgtttaaaaactcagtaagcaaaagatagcctatctgaaacatactactttgtctacaaaataaatctcaactctgtaactgatgttaaagaattatttcaatctgtctgtcacttagtaagcatgactaagaatagtaattttaatagtaacttatgctatcaataataataaacatataaaagtttcctaggaatgtgtaaaattctactgacccctgtaaaatactaacgaaagagtggaaataggagcattttcccataagctgtgataaaataattcttagtatgataatactttttaaaaagttgacagttgaagaaatttaactaagacaatgatgtactagacatccttaaagtgagctgctgctattactgtaagtttaatcattataaaagccatgacacttctcttagaggatttgtgtacattatcattggggagtactatattatgatagtaagctacccttgtgttatgaaaatgcatggaaatttgggtgaattattagagtaaaatatacctcacaaacatttgccttaatacaatttgccttaatacatttgccttaatacaaatgataaatttgtgcaatggatctaaaaagttatacatgtaggattatatagacatatacatagtgagaaataacattttaatgcacattgcatatacaaaatttaaaatctgctcattcatcctaaatgtttagtgcataataaaaacattaaaagtatacaataagtaagttttactcagaatgccatacaaaaaaaacacatgaacattcaaatttggcaatagtgtaatgctttcacaaaagctgaaaactctcatacatgtttaaaatttaaaccacatggaagttgggtttagctatggttttatacttggatttaaatacgtttgcttatattggcttaatgttgtccatccaatccctcaagaggaccacataaaatacaaattaacatttttgcgatatagaaacatgaaagtccataacggtttttttcttccataagctaaataccaaataacattatgatatccattaaaaaatttaataatattttgagaaatacatatggatcatttactttttaaataaagtaagcatagtcattggctttcttactttttaaacttaatataatatataaagtcaaaagggataaaaactgtaagtacattactccataattgatagtttccttttttcttatgttttactttcttaacttatccagagagaaaattatatttagcatttttctgcagtatatgcccgtgttttgtagatatgaatggctctttagaagtacatttatagcaacctagatgtgattcaaaattagtctttttggttgtcagaaataaagtaaccacagtatagtcacagccttttttttgaaaagacaggatcttgctctgtctcccaggctggggtgcagtggtgcaatcatggctctcacttcagcctcaaccacccagagctcaaacaatcctctcaaagtgctgagattacaggaatgagccacctcacccgatctatagtcatagcgtttcaaattaaatatttatttatcatgtttataaaaaaccaaattggtattcaagtaaaatacatttttaatcttacaacatcatagattatgtagcatttgttcataaaagtgactaaagtattacaaattaaacatatcaacagctactaaaaggaatatatgactttctcattattttcatatggtacaggtatctggtatgcaaaaattaggtatgtatttgacatattaaaataaatcttgaaatctattttccatcagcatatataaattaatgactagaatctgtcactgtttttcaatagctggagttggaacacttaacattatttacaacaagcaatatcgcgcctgtaatcccagcactttgagaggcagaagcgggctgatcacgaggtcaggaaatcgagaccatcctgactaacacggtgaaacctcgtctctactaaaaaaataccaaaaattagccaggcgtggtggcaggcacctgtagtcccagctactcgggaggctgagacaggagaatggcgtgaactcttgaggcggagtttgcagtgagctgagatcgcgccactgcactgcagcctgggcgacagagcgagactctgtctcaaacaacaacaacaactacaaaaaaaaacaagcaacaatataccaggttgtcagtttccattaaaggaaattcaaatcaacaaatgttaagcatacaattttcactatgagtaaataatttttgcattaaaatacatcagccaggtgtagtggctcatgcctgtaatctcaacattatgggaggatcagttcggtgggccacttgaggtcaggagttcaacaccagcttggccaacatagtgagaccctgtctctactaaaaatattgtacaaaaaaaaaattgccaagtgtggtggcatgtgcctgtagtcccaggtactctggaggctgaggcaaggtaattacttgaacctgggaggcggaggttgcagtgatgagccaagatcatgccactgcactccagcctgggtgacagaataagactctgtctgaaaaataaataaataaataaaaataaataaataaataaataaataaataaatctcataataacatttctttatctttatctcaatcattattaaataaatatctgagtgtactatgccgctgatggtaactggttgttgaaaacaactatgttttaggtatattaaagtattattgtattctaaatagggagaactttatatttcctaaggaaatttattagacaaataaggttctagaaaatatgacttgattttaaaaatggcctttatcatgagagatcgcagaaaaaataaaaatcatattatgtcagaaaggtagacaaacattataattcaattataatttacctcaatcttcaaggtttttgcaatgaacttataaaaaataccagtgtgaaaaatttaaatgaattaacatgaagaactcagtgaaacattttcttcagttttgtaatattttagctctaaaattaaaaaggaaatgaaaattagataccatttacatttcctactccgctccaccaaccccccaaaaaagtaataatttcttaaggaaaatatgatcgatcatagttgttttaaagttagagattttgattgtatttatttaacataacctcctaaagacacggtgtcatgatttataattgtttctataagattatagtgttctggtcatgctgttttctttctctaatttaataactgagttttgcataatcattcaatactgtcataaagagaaccaaatatggccattaaacaattagaataatacttcatttatgatttggctattatttaggcagatttaaaaaactatataattattattataaagatgtgtttacaccattatttgtgtatctgattctaatcccttttggttttatccaacattatgaatgtaaatgatgatcataaaatatctgatattttatattaaatgttacctcacatctgtatgatttactataatcacttcacaaatatttattgagcaccaactgtgagccaggcactgggctaggtgctatggagtcagtatgaatatatcgtagagtaaaatgcaggcctaccatcactgaggttaccacttaccgctggcagataacagcaaataagcaatttaccaaaccacataatgagaactatactatgattaactacaggcttgggaaatacaacataggagaaactcagtccagtcttagaagcttatagaaacctttcttaaagaaataaaaagttttggggtaagatgaaacagtacaggcaaagaccgagaggtgatagagaaagagaaagtaaaaaggcaggtgtgaggagacatgaatctggggagttatgaagaaaccagactgtacatttgtaaaccaagcttgttttagattacgtgccaagagcaccatgtgaaaacttttttttttaatgtgaggggagaatgctatcaaatttgaattttagaaaaatcattttgtgtgcagaagagagaatggcatagaagagagtaagaaagctgacagggagaatgagaggagacacatggtcgtgttccagggcagcaatacaaatggtctacactggggagtaactttgggaatgaaaagacaagccagaggatggatttcagatgtccagagaatattatctatgagctctggtaatcaggtagatatggagagtgtgtgagaagaaaggaaaatcaatgaatgttattcagttttcttacttagcaatatccagggccatttcatgagttaagaacgtatgtcggactgaaaattaaagtaagaagaagtgttttaaaaattagaaaaagaaatgtgtcatttctaaaggcaaagaaagtaagtttaacaaaaataaaagtaaaagattggtaaagattaaaaatatgatctttatgtttaatgatttaggttattgctatcatccatctgtgctgtatctcagatcttacagaatcatatgaagagacatgtctttccatctgcctacgtgcatatgagtgtgcaaatatgctaaagaattaaaatatgtaacaaaacattgtatgccactaagaaacatgttttaaagtccttcagaaacaggtttgtgtaacctagcagtaacctttagtaacctatactgaaatctacactagtcaaactaacacattttctaagcttctaaagccctcaactcttcttttgtgatttgcaatctggcagcaaaactaactgcagtttcaacttatgaacacttcttttacactgatgcctgactgatcgtgaagattctacttcatcttcacccttctcaagtgatggcttttttattctgctattcgtgtaccatagagccatatatatgtatatatgtctactaagagctcgttatttttttcaaaacattattcctccttcttccacagaataaactctcttaaagtagattctactagattacatcagagtatactatttacattttattcttgctgcattcaactgcttaaagcctgctgaatcttactcatccattgaatatgttttagcatctagcttactttccttctatctactaaaaatcttgtaaacatttttaattatctcagtgttcatacaaataaactgtgaaatgctttggcctttttctcttaatctttctcacctgcaagaatcacaaccttgtttatgtttaaatatgtgattgctatcaaacagcttaattaatgtgtctggatataaacatgtatacacactatgtgaataaattcaagaccttaaactcaagagattctttaatgttgcctggcattaatgtctctagccaatttattccttcaacacttctaaaggatatttatacctgttctgtcttcccaaaactcaaacatttcttctctacttgcacagctacaaacttgctttttacacactcacacacaagaaaacaaaacccaaaattaatcagatcgcaaaatcaattaacttatcaaaaaccctggccaagtcctctctacctccctccagttgcaatgtcgattatgcccttgtctcccatctagacttgccagtgggattctctagagcccatccacatatgactatgcaagactttagttctaaaagtatttttcttctttttttaaaaaatcatctttgccctccatttattcatgtagttttactactgtaaaaaaaaatatgtaatctgaaaaaaagacttcacattgtttaatagctactttcccattttcatactcttcttgacagcaaaactcactaataatttacctctaccaattgcccacttttatcctctcattctatatttaaactatttcactatcccaattatctcattccaactattctcatattggtctgtatttccatgttgcgaagtcacttaattatttctgaatcatcagtatttgatgtgtgtgtagtctctctcctccttgaagcatctctttcagtggagtcatggaaacccagaaatcatcagagttttttttttttctaacctttctaggcttaccattttagtctcctttgtgatttcttctcatgtcaaaatattgtaatatactgcagctcaatccttggaccactctttcctgtgcatgtttattccatgggtgatatcagtcagttttactgccttaactaacatctacatactgatgacttccagttatatctgcagcccaggtctcttcctaaacccctgtgccttatgtacgtatctacttaagtatttaatatgcatttcaaactttatatattcttaatttacttttaacattctcctcacatacttccccacttcagttaaaaaaaaacttcattatatctcttgcttatgccaaaaaattcaaggtcaatattgatcatcattctccactgccagttaatcagtaaattctgtcaacttgacctttagaaaaataaccaaaccagaattctctttaagagtgtacattgtttataattattaggtccattacatatttagtaatttagaatagtaagaaatatagtctgggaattggatgatattaacagattattgttaaataaatgtattaagtgtgacagtgttgttttggctcagtaagaatatgactttttattttttttagaagtgcatactaaatttcttagtgtctgtactgcagaattaagcaagtgaatagaatgagttagaaactcattacaacttcctacacacttagaattttccttagcatgtatttacttaacggattgatcctgctcatctttctctctttcaccaacatgtaagctctaaaaagatgggacttttcgtttattttgtttgcaactatattcccagtacctacgacattattaggcacatattaggtagtcaatgaatactttttgaatatatgattaattatttattatgtagattcttcccaccttcccaacctcctaaatcttcccagagctcagttcttatttctcttttcttctcttttcctgtactcttcctttaaaaaatatcatctattggccggagcggtggctcacgcctgtaatcccagcactttgggaggcaggcgggtggatcacgaggtcaggagatcaagaccatccaggctaaaacggtgaaaccccggctctactaaaaatacgaaaaattagccgggcttggtggtgggcgcctgtagtcccagctactcaggagggtgagacaggagaatggcgtgaacccgggaggcggagcttgcagtgagccgagatcgcgccacggtactccagcctgagcgacagagcaagactccgtctcaaaaaacacaacaaaacaaaaacaaaacaaaacaaaaaatcatttatttctatgacattaaacatcatgtaaatgctcatgaatgtatatctctgtaaatgtctccatttacaattacaaaaaaaaaaaaacaaattttcctatttttaaaatttttccccattccacatcagcaaattctatcagcttgatctttaaaatggatctgcaagtaacttaggtctcattttcagaactacaagcctaatctgagccaccaaggtatgttttctggtttactacaatagccagtctccctggtcctactcttttctctccagtttattctcctccctatgttggagcaatcctttcaaaatataagccagatcttagcactgcctggataataactcttcagtgattttttaattttatcttgaataaaatctaaatttcttatcattatctaaatgggcccatatgacaaattgtttgacaatctctgataagataatctctctgctcactatactcaaccaacttggtctccttgatatcacttattgcaaattaatggataaatacgctctgataatttgaataacttcatgcaaattcaaccagcttttagtagcagactctggttgcaaagctggtgattccaaaccatgcagcatacagttctcacctcagagtgtaatgtgccactggaagcaagttggggacattaatgaaattacagaacataaaatatttgggctggggacagtgagggttaatatagtgtggtcctgcaaaatagaagtgggcaatagctaaatataggtgtgtatgcagtgtgtgtaatattatgactagaccccagcaagatattgtggatgaaagaatgtggagagacagatatgaatcaccatgtataagaataatgagaggcaaaaacggatacatttgtcaaaatagtgtatagagaacagaaatttgggtgagcttatgtcttgggaactcagaatctgaatggtcatttgactttttactttttacaacctttaagtagtaaggtcttacttgtttctggaataccaggtcaacataaacaagataaatatactattggcaggaatacttctcatgtttcttataaagttaccatgctcagtgtagtaagtaaacatccaaaaatactttttttaaatttctaatttcaaaatctttctatttatttatctttataatgtatattatatgctttgttccatatttcataatgatgtatttatataaaatgcaaaaaacaaatttgatcataacaatatttctgtagctgtaattgtaaagcagtataacatttaataaaacaagatgcttctgattcttcagcattccctcagatagacatttctgaatgacagtcatgagattgtttccaaggtacatgcaaatcataagttattaaataatagttttcagtataaaataattatccttgcggttttcattatggcacatccgccttggacagaagaaacaaaatcctgtgactgacttagctgcaattagcaagtcattcagaaatcacattcatcactgtcatttcagaagagtctagaaggaattgcttgtgctatatttagcatgcatgagagctgtaaagtccagcctgttcatctttctcacgtttctgtttgtttgcaaaagctagaaagctgtagccaagaagggcaggaaggaaggttggctttcaatacccttcttcagttcagctgagaactcctttctatgactcaatagccagttccaaattaccacattattaaaaaaatttggttatcctgcttatattttcttcatagatgatattactacataaattaatatctattaatcaatttatttattattaatctccaatcattaaactgatggatctcagagatcagtgacttacaggttctgtttactgttatatccattgcccacattcctggcacatgtcaggcaataaaattcaattattgactaacaaacagcttcctgaaaaaaagtcagttcagtttctttattgtggatttttaaaaaatcaacagaaaactagccctcatatgccatttctccagataagagtaatctcattttttcacaatgaagaggttatctttagtcttgaggtctatatatacagagagagagtagcagtagtgaatacatctggtgtcaagtacaattaaaattatgtcatagggagaatttaaatttattctataggaaaagcagagaaaccctgggtaaaatttatggggatatttttgagcttaatattatatttggtattaataaagacatatttctctttgagaaaaaaaataaaaatagccctggggcctggaattctagtagggcctgaatgcaggtctatttttccaactagatttagtaacgaataaagttgtcagggattggaatgaccttgtccagattgtgacacatattccattattaaaagtgaaaaaacagaagttagaatagctttgtgcagatatactaaagagaataaaacactgaatggaagattagacaacattacttcaagataacttgaaattcttttaaagggcctaatattatttttgattcaaaaaaagtattcaagtaacagaaaaaaaattttggaggaaaaaatacccagaaaattgttacctgaaataatttaagaatagaaatctttgattataaaatacttctaattgcacgctaataaagtagttccatgagaaataattgaaggctaaatgggacattgtaacactttcaaatagtagaaaatatggatgggatatttttaacttactaatgatcagtaaaataattgggaaaaaagaattgtggaaaaatatggcattttatatggtaggtagcacacatatctttattgttacctctctaatattaatatagatttgaaattattttggttaaaggttttcaccaattacttaagtatctgaaatcgattattaaaatgaaataagattattttgtgtgtatcaccattttaatcattacaaattcaatgttcaatgctcactttgaaaaattcattaagcatgatttaggctcgagtctgtatatatgtttatggtaacaaaactgacttacaatgtttatttgttgtgctgacagcttcctccataaacagtgtcattgctgtctatgcaccttaatgtggcacatttggttgtttcatcttactttccctatatacaacatcttttatgtagatatacaaataaaattaaatacacatagatatatttaaaattttagcttcactaaattcattacattacctaaaatcccctcattgcatattagacactgtgtatattaatacataaaatgatactaggttcaacaccttaaaatttttaacctaaattcactgctaggcaggagtgtaggttcataaaaggaagttaaactaaaataacatacagcttttctaaagcaggaagaatatgtaaggcaattatattctcatgattccaagttgaaatctgtgccatttggaaggaaacacaacgctaaatagagacaaaatattttgaaaattggataggatttttgtaaagatttcaaataaaatagaaaaaatattttaacttaaaagttgaaaaatgatttatttatcaaagttttctaagttatctgtcagatgatatagatatgttttgaataagtactaaagaaataaggagatgagctagtcacccacagccacagatattatcctaaaaactgtattatttgtaattctatcattgagaatgaaatttgtttatattccatttgtatctctgtatgcaactatatactctagtttttttttattatttgtttgtttgtttcgttttgttttagaaaaactgcatgagaagactgcttacttctttttttgttcagatggggagctcactatgttgcccaggcatatctagaaacctagggctcaagaaatccttctaactcagtccagcttcccaagtagctaggattataagcacacaccacaacactcagcaaaattgctttttattaggaaacagtaatatcaatttttttaatgttaatgttgaggtacttagttgaaatcattaaaacaccagatttatgtttttgacattgtaggctttgagatttgaaaattcacctacctcagccattcaagttgtgtgatattggacaatctcagcttccttatctatataatctgaataataaaattgcctctttcaaagaattatagtgaatgttaactgagtttttgcataagaagtgctcagttcagtgtctaatagatacaaaatttctaataaatgttttttaaagtatattcttcttaaatttactcatatacctctgaaacaggtctcaaacaacctcaaaatatcttagccaacatccacaccagttgtttagaagagaaaatacacctacacacacacacacacagacacacactttgatttttcatttgaaaggatacgctgtagtttcaagtgtatgcagtataattctaatcactttaaaggttctttctaatacaattagtctaatggtttacttactcaggtaaaacctttaccaaacagccttttatcagacactgactctatgcaagtctacaagagtcaaaaaaacagacatgttgtctgctattacggagccttaaagtctaatggaggtgattagtcaaatgttgggacctccagtgaatagtgatataaagtcaataactttgaattcaagaacaattatttgatatgctgaaactacccattaaagaaaaacatcacaattaaatttttgtataattttcttggagtattatttcccaagtcttttctaatatttaagtatgcatttaaaatcaagctattttaagatttgtatatgctactacaaaactaagtttccaggacattttctggcagttcctagactcatccctgaaactgtgggcttgctgccatcaattttatggcacagactaaagcaaacagacgtgaataagagcaaaaccgatagaatttggaagactcaaaaaagaagccaatttgtttcaagtttgagattattttcttatctataattaatgcaaagtctgcccccttattaaaataagtgttctagtgccattatttgaaagtacatttgagctttctacagatcattaggctgtcactcctctgggattcgtatgatcgcattcaaatgataacagttgctttgttgtctctggaagatgaaaatgggtacaaacataatgcatcttcacatttggaaattagggaagacatctggatgcacttgcccagctaatgaataaagggaaaaagggaagaataaaggaaggaaggaaggaagaaaggagagactggagggagggagggaggaaggaaggaaggaaggaagggggggagggagggaggaaggagggaggaaggaaggaaggaaggaagggaaggagggaaggaaggaagggagggaagaaagaaggagggaaggagggaaggaaggaagggagggaagaacgaaggagggaaggaaggaagggagggaagaaggaaggagggaaggagggaaggaaggaagggagggaaagaaggaaggaagggaaagaaaaagtttctgattttctttaatatgatttagtattcagcccaattcattttctgaagttggaggaggctaaacattgcctcgtatctcctctttaacttgccagctaattatgcaaacctttatatccaaacaatgcagaggaaagaagacagaataatcttccagaccatgaaagctttgttcatccatcataccaacagtgtactaaagatcttagagatcttttgtgtggtaactctttgccctttcagctgatgaataactgaagatgtgcaatacaaagaaattactaaaagagaactgtgcactggaaaccaatttgttttcatgactctatccaacgactttagtgaagtatttaggagagtgggttaagtacacaagcctcttttaaatacttattaagattaaaatgttcacataatatataaaagtatgctttaagtgggcacttgattcccagttagaaatttaggattaaaaaaacacactacatctcagcaacggtgaaaatacgtgaagattttgatttggattaaaaagaaaaaatatttctttgtgcttaaggcattttatactccattttatttcttgaacagaacagagcttaacaatactgactgacaatatgaacaaggctcttcattaggatctagtaataaaacaaatgattagagtaaaggaagacttctgataccagaaatcattcaagaagtctcaccttatatgcaggattcagttttacatttttgtgtgtgtttttatttccccttcaaaccaaatgtttctttcttacttatgaggcatccactttgataacagatgtcaagctatattatatcataattggtctttgcttattgctagtgatgaaacctcatccaatatttttgcatgcctccatttactacagctgttaatttttcttaaagtttgaaaattatgtgcagctagtatgtcttcttcctagtatttttttaaatgaagtgtaatttgttcccctttattagtgctggatgaaaataagtcttcttttttatttcctagaaagtttagcacattgaaatgttttgcctttgatcaaatttgtgtaaaggatcatacagattatatatttcctgtggggttcttctcttctcctcttctcctctcctctccctttctcttcccttcttttttctcataaaaacctatatccaaattctctgtgaagctgaggatgtattccaatccacaagtcaggaatgatgaaacagtaaaagtttaataagctacttggccatggactcttatagcacagtatatttagatacaagaaatcatccttagttaatttatgaatttttgcaaatttctaaggtatgctattataatcctgtccctctaggtaccttgattcctgcccaaaaatagcaaaccttattatttaactaagaaaaaaactgaacaaactataatgaatctagggaattgttcttcggtaattatttttctcatttctaccgttagcaatagaaatgtctggagatgggaggaagcaactaataaaagtgaactagattgagatatttgcattaaatataatctaaattgcaaataatcctcttacattctctatgcacagctgcattattatacagttcacattgctttggtaactaattttttctgcctttattacatcttccagaaaacaaaaagaatacagttataaagaccttcctaacaaactatagtaagtcaagatggagaatataagtgggccttggaaaatctgagttagattttagtttgtgaacaggcttaagagaaagtcgtctatataatgactcctcatcagcagatgaaggacattgaagtcaaacgttttgctatgtcacgacacttgaagaatcagtgtgagttttcaatgtgagttttagaagattaatatttacaagacatttttctttaacttaacacatgagaaaatgtgagtttcttttttaataaagtgaaaagttttattttagaactgatactgaattgatccaagatacatccaaagttccgaaagctattcacttaattcttactgcaaaaaccatttttttcagtgtatattttcctaggtttatgataggcactggacatgaaaaaatagataagactgattttctctgaagctcaaaatataattttcaatttatataatttggcattgttacagtatttcatttgtatgttataatataaaataaaattttatataaatgatatttgttcagttattttgggtatttctaatattcaatttgcagaatacagagatgcaaacacacagacacacacacacatgcacacacacatgtttgtctgctctataggctgaaagcttgtgtgcttccaaattcatatgttgaaatactaactcccaatgtgatggtattaggtattaggaggttgggccttgggaaagtgattaggtgatgagcgtagagccctcatgagtgagattagtgctcttatatcagagacctcaaatagctcccttctcccttctactatgtgaggacacagcaaaaagactgctgtctatgaaccaagaagtaagccctctcatcagacaccaaagttgccaatgccttgattttgaatttcccagcttccagaatatgaaacatcaatttctgttgtctgtaagctatccaatgtatgatattctgttatataatcccaagcagactatgacagcttgtgtatatgtgtgagtatgcaaagaaaaaatacttacatttttcttttatctttaaagattcatcttagaagcttgtagaaaaccatgaaagaaaaggttttataaaactaacaaattacctaggacattgccttgtggattaaaatggagccagtgtgattaaattactagtaatgcattcacggattaatattaaattgctgtaataaaattcagtggatattaaactcattttatttgggtatatagttaagaataaatactataattaatttatttaatttaagaaatctgtgtatttttttttttttatttgagatggagtgtcgctccatcgcccaggctggagtgcagtggcgcaatcttggctcactgcaacctctgcctcccgggttcaagcaattctcctgcctcagccttccgaggagctgggactacaggtgcacaccaccacgccccgctatttttttgtatttttagtagagacggggtttcaccatataggtaaggctggtctcaaactccttatcccaggtgatccaccgccttggcctcccaaagtgctgggattacaggcatgaacatggtaaaaaatggtttgcacgtgagacactgaaaagttgtcccagggtgtctgattgccacaacaaatagttactggaagcagaatttcacattacttggtttggaatactgtttttcttaaaaatacggaaattgtcatttgtgaactattttccatgtggtagtagtttttaaatgtgaacatttactgtgaaggacgaagaggtaaccacacatcagttgtgatgtttcttacttattttactcatatttcttgcctgcacactatgagtcaggcacaatttcaggctgtgaacaaagcaatcaaatgatagtttgaatgagacttaccctctcatgagaaaaaaggaaaaaggacagctaaagtacatagaaaaatatgaggtgataaacactgactacttcagtttggttcccaaggaagatctgtctgaagagatggtaggaggagaataggacaaggagctatgctttggggaaatataggcattgtatatcctatgaattggtatagtgcattatgtgtattttataatattatagctgtattgaaatttgtaaattgagtaacattgttagtgtagctgggagaacattacattaaaaagcttaagacctaaagccataaaattactagaagaaaacatatggaaaacactttagaacattgatgtaggcaaagatgttatggctaagactgtaaaagcacaggtaacaaaaccaaatttagacaaatggaactgtattaaactaaaaaaatcttcttcacagcaaaagaaacaattaacagagaaaagggacaacctccagaatgagaaaaagtatttgcaaatcaataaaagacattgtttataggaaaagtaagatgaaacaaccaaatgtacaactttaagttgcccagacagcaatgatagcagtttttggaggaagatatcagcacaacaaacattttaaatcagtttttattgcaatacacatacatacagaattgaacccatatcatgtttaatgaatttttcaaagtgagcatctaagaacactgaatttgtaaccattaaaatggtgatacatacaaattaatctattttatcttagtaatcgatttgagattcttagttaattggtgaaaacctttgaccaaaataatttcaaatctatattaatattagagaggtaacaataaagatatgtttgctaccttccacttataatggcatcttgtttttcaataattcttttctcccaattattttactaatcattactaagtaaaaatatcccattcatgttttctagtatttgagttttatgatgtcgcaattcagccctcaagtatttctcatggaagcactttattttattagcatataatcagaagtattttataatcaaagattttttattcttaaattgtttcggttaactcttttccgggtaatttttcctaaaagaaaattttccgttacttagattttttttatcaaaagtaatattatgccctttaaatgaatttgaagtttccttgaagtaatattgtctaatctcctattcagtacaaagctattctaacttttgttattttttcacttttaatcatggaatgtgtgtcacattctaggcaaggtcattccaataaaaaaatgcatgttaagtaagaactggtggatctaattgaaacgcagagattctatcagtaaaatcaagagtaactacaaatttccagctgcgtacttaccatctccatttggatgtaaaatttaacacgtgaacttaacatgtgaactctttattttattttattttattttattttattttattttattttttgagatggagcctcgctccgtcacccagggtggagtcagtggcaagatctcagttcactgcaacctctgtctcccaggttcaagccattctcctgcctcagcctcccgagtagctgggatcacaggcatgatcatatcgggtaatttttgtattttcagtagagacggggtttcaccacgttggccactctggtcttgcactcctgacctcaagtgatccgcctgccttggcctcccaaagtgatgggattacaagcgtgagccatcatgcccagctgtgaactcttgatattgcattccaaacgtgctcttcttgcagtctttcctatctcagcaatgtcaactacattcattcttccagtttctcaggccagaatctttggaatcaaccttgcctgctcctttcctctttatatctaatctatctgccaagtaatggctctacctacaaaatacatgtaagatctgactaattatttcaatttctgccactacgtctctagttcaagcaaccaacacttctcacctaaattattttagtagcctcctaattggtcaccttgaaccatctgtagttattcccagcactacagacagatgatcttttaaacaatgtaaatgagatcttattctttccttcccgcccgccccccaagatggagtcttgctctgtcacccagtctgcagtgccatggtgtgatctcggctcattgcaacctccacctcccgggttcaagccattctcctgcctcagcctcccgagtagctgggattacaggtgcccgccatcactcccagctaatttttgtatttttattaaagacggggtttcaccatgttggccaggctggtgttgaacttctgacctcgtgacctgcccacctcggcctcccaaagtgctggattacaggcgtgagccaccgtgcctggccagtcttgttctttctttgtgcaaaccctccaattcttccctctcttactctgagtaggcacaaaatgctttcaaagacatacatggcactaaataatgtgaacttactgtcccctctccaacctcacctcctacactcattcccttgctccctccactctagtcacactgtcccctttgctttccttggaaaactctaagcacgtgtttttctcatgatctttgttttccatcccttctactgaaatactatttccccaaacaactatttggctcatcccttctctcctcaagtcttcacttcattttctattaaatattacaaagctcccttacccagagttagagaaagtcaagtttaatcttccagtcttcgaaattggtccaagatttctcacaccagtcgtaagtttagggtccttatggctaccctcacttcagactagctgtttacaaatatggagtccctgtggactctgtcagattttataactcagaagagctattcatagaactcagaaaagccctgtaattacaatgacagttttcttatagcaaaaagttacaaattagaaccagctgaggaatgagacacatagagcatcttggacttagaatgttccaaatgcaaaacttctctgtcctcagagatctattatcttcaggacatctattgtgccggtgtacttatggagtattgccaatctaagaagctcacctgtatctctagtttttattgggattttattactatatttaggcatgatcgattgaatcattgttcgcatggttaaaatcaatcttcagctccttcccctccatggaggtcagtatgatatcacatggctaaaagtctcaactctctaatcacatggacagtctttctggcagggagagacaaaggacaatcacatgttttattatggactccctcaccatccccccctcacacacacactgatacttactcacccgccatttctatttatccccagtcctcattttattatcactagcacctagtatcatctaacatattacatcatttctttattgatcttatttattgtctttctcatcaaataaaaatggcaagataaaggaatttctattttgtatttgttgaatctcttaccactcaaataatacctgatctagtacacactttataaatatggttgaatgaaggaatgaatctgttttctaaatttaggtcttcttatagcccttctattccttattttacaatagaatatcatttaagtgacatggaatggaatctataaatattttaacattttaaaatttattcaatatattttcctcaaacctcttatgacagtgaaagatttcatctagacttttaatatgtaactattaactatagcttcattttactagattttaaagctaattaaaatatattctctcaaaaattactatagcttacttagaaataactgtctctgaattcctaaggataattttaattctcgttttaggcttaggtaggcagcactaggattctataattccaagaatactttatttttgaagctagatgcataatttttcttcatatcagggcatcctgaatcaattgatgtctttttctttaatctgttcataaaatgagttatcaactatgtgctgaaatatcaatgacaagcaagtaattttctgtaacacagatgtaaaaaaaaagatactctgcttttttttgttgttaagttagctgtgtcttaaaacctttcaaacctacatatgaagaaaattctaatgggtgatctgtagagcattttggtataccacaaagtagaaaaagaacctgatactaagaatagaacacatacaacttcatggaaagttttagttattactattttgaagtatttattttgtgacgagaacaaaaaattctttgagaaatagcaaagtcaagatgtttaaatttatgttataattttgaaataaaaaatatgtagtgttttggaattgtgcatggtggaaatatgttgtatttcacaaagcttttaattgatacagacagaattgtctctcttgttattttgtaagtctttggagatttcttcaaattatagaataaaatactgcatcacttcaatagctatttcaatcttttgaaatagctgcatctataggcaaaggaatcttattatctctaaattacaatttggtatgtcatgagttatttcataggacaaagtttgttaaatgaacactcactggcagtgtcattagtgctttgctcttgaactcaactacgagtcagctctgtttacgttgccattcacagaagacagaaatgaatgcgcagttaaaatggtgccataagtaaagtagagcagaattagaagaaaactggacaatttaggaacataagaattgctgtactgaatcagaccatcggttctcctggtttaatatccagcctccagcagctgtacttgttagtttctacagctttaaaagaaagaaaaaagactacataatttacctagacaattgtgccatctgtgatctggagaaattttctccttgacctctctcaaataataccctaaagcaggaggtttcaatcttgctatgatattggtttagcttgaatagctctgattattaataattcttattaaattatccaattcctccataaaataaactagtacatcaagaaactgtttgtctctaaagctcctgaattcatggttgaacatgtctgcatctatgataaaatatgaatttatggtgcatattcaatataagttcttgatggcaaaaatctgcctcttgataaccatactggatgaatgtttacttcttccaaattctactggacttagagactttggccaaacaaaacaaaacaaaacaaaacaaacttagatcggctcatactactccaaaatttctatctattaataatatacagaaggtatctgaatgatgaaggattttttgtgttgaacttttagaaaatttcaaccagagtttttcttaatatgatttagcataaggtagaataagagcaaggaatgaattacttatctttgtcactttaatcttttgtttatgttagaaaaggctgaaaaactttatagtttcttgattattctaaataccaccttcagatcaatatttctaaaatattatgctcacactagccatttagtcaaaagttcctcaagagtagtaaatgcctacaagttcgatttcaaacaattttccagggctgttagaccttaatgtgacaacactgatatcctaagtccatatattcaattgtatctccttctatcctagaattcaacaaaactagttttttcgtcattatttgaactaagaagtagattaatcattaatgtctatgttaattctatccctttttctagctttcccgactttcctttctagctcaggtccttatttcctctctttcagccagattcccattccatcaggtaatttcctttcaagcatgtaatgactgctccttcttctgaacaatttgtggccctttttttagactcggtttatgctatcttatgttgtagttctttgtttccctgggttttcttgcttataaattccctgaggaaaactttgtgtttcatatttatatttctagaggctagatctgtgtctaactcatactaataacataaagatatattataaggaaatctacagatgtagtgactgtgtagagccacttttaaaaatctctgagttcctgtttgtgtgaccttggcattaatatattattgagtgctataaaggtataaatgagctcaacactgtagatattgaaaagatagagtcgacagttattcattttcaaataacaactataagcatgggaaatatcataaaaagataatatgaaagttttgaatgagtttagacacataaaattggaaaataaaagaattccaagcaaaagtaacagctagagcaaagagaagaaatgaaaaaaggagggatttactggggaactctatctaattccctaactcctattggctgggtgtataaaaagaatatctgaaaataaatttggaaatgtgggtggtaccatgttcattaaccttaatatgaaaccacttaagaattattgaaagatttttaattagtaaacagatctatgagatgttagctaaacttaaaagtgggactgaaagaagtttcctggagtaatgagattattacataataagatttgtaattaaacttggtcttaaactcaagcagtattaataagagtatatagaatgaaatagatgcaaaagatgagtaagtgatatgattccttattgtgaaatttttgggcctaggataagggaagataatgaaacaaaagtaacaccaccctttgagcacgtttaagtgtgaatgaagatatattttattgaaataaaaaatttcttcttccaatatgttaagcagaaatgcatataaaaaattcaactttaaatttcaattcttacaattttaaataacatagtggttctcagtgctcaaaccactaagcccagttcacatacgtttcatatcatcaatatatatccacattttttctgtcttaaattctttaaagctcttgtgaacagtgttagaaaacaatattctttttaatctaacaatgatttcaattttactataatgtctctattttattatttaggaatccaaatgagactcagaacaatagcacaagctggcctgtcttcaaaagcactgaacaaaaatatctaaccttgaatacagagtcaacaagaataatgacgaaactacgtgctcaacaatgtcgattctggacatcattttttccaaaagtcttggaaatgacaggtgtgtctgtttttagtgtttggttatttaatagatgatgggttatgtaaaaaagggatgaagtatactctccaaggcacggtgatggagttactatatgtatctctgactttaaaataacttggtttaatgaacacattatttttaagactttcttctatcaagtttagatatgttttgaactcttactatatgaccagtactttagtagttaaataaagaaaactaaaatatagatttcaccctgtggaaatataaaatagaaaaaggaaactaaaatagagccctacttgttattcagataatctttgtggaattaattaatggacaaagaaataaatatatcaaataatcataatgtatggaactaaaaaataagatgcataaattggtaaaaacagatttattgataaataatagaaccttgatttaaatggagaaaaaaactccgaagtttacatatttaaaaacacaataaaaaatttctaaatattctgaacttggaaatatttatctaagagcacacacgcacattacataatatgatatgatataatattacatattataaacaaatagttatttagttaactagtcttaaggaagtgattggtgagaaatgggtaaggaaatacgatgaaaatttgttcagattattatctcaatattcattattaagaaaatatttcaatccacttgagtgatcaaacatgtgtcaccttagtttgatcttctctgacaaatatgacatatatccaactcactgtctagattttaaaatttcagctgtttataatccatgtggttccttaagtatactttctgaaagtaattgattttcagccatcagacatattgctggtcaggtccttcagagtttgctattctgctcatcatgacgatctgtaattttcaggctgtatatttggtatcataatacagtagatgttttccatttcttgtttagataagttgtgggctagtttcagcaaatatgggcatctcagagctgtatttgattgcttaatatgccttttgattatcagacattactcacaaaaattataattatgtactccatctgcttgggaaatgtttctgatataccagtgctctgtgtattaccaaatgttctgtgacataatatataaccagggatgggattctgcttctcttggcagagcaacagtgccatccttttgtcctccgggtgtaaataacgatgaggtaactcattaatatgccaagagacccaaagagatactatcatttatcatatcacatactatatattattaatctttatttaaaatatttttatatgagagggttataatttgagatataatgagtgggttattttaagtgacttatttattataagccaagctgagcccttctggttaaatcatgtgtgatctattgcaatttatgcgatgatacaataaaatttgaatatcagcattttaaaaaactatccttcacaaatttctatttccaaatacttacctgccagaaagcagattaaataaacaaactccaaagtttttgccagctgctgctatttcccatacaatgttgaacaaattcctagcttgtgtaacgctgagctctatggaaatacctacctagctgtggtctaggaccatgcttaaggttaggttcagtgtgtcttgaaaatataattttgtattataccattttttctaattaattcccccataataaggttttcatattagatatattttataattttgaagtaaatgcacgatacaattattgtaacatgtattcactagtaataaaaatgttacatttgaacaaaatcagtttgaagttacaaggatttaggttttataaataaatagtgtggacagattaaaaagattaagggcccatgttcttgccatatcttatatttttcaagtcacaaaacttcaaatattttaatctttaatgttttgagaatgcgttagtcagatgacctgggctaaagtttttggaattttttttaaagcaactttatacctaaagaaaaatttcaaagaataactactagctggctttcttaaaaggaaaaatgtttaccttactcaagatggaagcccaataagctttgtaagtaccacctcagcaatagtttacgtttgagcaataaatgttctcaaataaaatgattcttgaaacttgtttaaacacacaaattctaacacttaactttcagaccatacttcagcacatggctatgctgttattgcatgcacctgcaagaaataaaattcacaatatttatttcaaatgttatcaaattcagatttccacaaggatacaactattcaatattacaatatcataactatttgaaaaaagaaaaagaagtagaaaaatgacccactgtcaaggataataatattttttcactaaaagtggaagagtaaatttatttaaagaacagaagtccttcatattatcctaatgaagaaaaaaagttagatccaataattcctccattgacctttgaataaatcatgcttgccaacactaaaaagcacgtgtaaatttaagggccaaaataccctttgaactggttactttgaaaatcatttactactatttgctaatcagttagcaagactggcagtcaaggatgagggagtgcaaaggtgatttggagaaaatgttgaaactagtttattgtcttaatatgcctgaattatcaattcctcattaaaagcaaaacaaaacaaataaacaagtggcttcgaataacttaataatcaagttaaattaactgttccactttaaactacatgaagtcttcacaaagcctagcctaagtttatactagttcactctatgttcttaccccatgctcaaaattacgacagaacaattaatgattgagatttattgcataaagaaatatgcattccatgataagtttaataactgatcaaaaacagaaaaataataatgtgatggagacagattttcagtgaacactcaaatacatgaagaatgttgttgtttcttaattatgatggcagacttaattaaatatcagtataatctctcctatcttcacctccactagcaattgtgggttaattcacctttgcattctcttctgctagggtctgaatgtttgtgtccccctaaaattcatatgttgacatcctaaccactaaggtgctggtattagaaggtgaatcgttgcgggaggtgatgagttcatggagaaaaagcctgtttaaaagggattaatgctttaaaaaaaaaatcctgagggaactcccccattcttccatgtgagaacatagcaatgagactgccatctatgaaccagaaagcaggtcctcatcagacaacagtctacgttgcttgatcttagatggaagtataatctgctggaaagcctcctcaattgtgaaaaataaattgctgttgtatataagctatccagtgtatgatgttttgttatggcagtctgaatggactaaaatattttctaattccttagactttgttaaatagacttagctctggtgaaaatttactcagtgtcctttttggctagacaaaaaacaacaaccacacacaaaaaacttatcattattattttcatagaagagaaaacgattttttttccaaatgtgacaatacatgcaaaacaaagatcacaaagaagtgaactcaaaaagttatgccaatgtgtttataaatttaccgtttcacaaattgccttccacgactattcccttctctttaccctgtgaggcattaaacaaaaaattgattcccatcttttctatctccccaaaacccacacacaaagcaagttgtctctgttttacaatcacaacaagacttggtgacatttgaaataatcttaaagtactaaaatcattcatattactgagttggttaaaaaggatattattattgatttaaaattgggcatagaaagctgaagaataaaaatataacaaattaataggtcataggtatcaaggtgaatatatatatgtgatatattcatgtttatgtagagagcctctaacctcttattagatttatgtcctattaatatgctttgaaaatttatactaaaattgctagcctaggtataaagtactatcatttttccaaggaatactcaggtcaacaatatgagttgttacatttacttatgcatattgtatcatacaaattcacattttctgtgtgtgtttatcattcatccattaggcaattatttttagaaaataaaaactttattatttattatttttcataccacataaaaatttataatctgccagattttaactgttttatgtatattgagccatttggtcttttgcagaattttctttatttttttattttactttaagtgctgcgatacatgtgtagaacgtgcaggtttgttacataggtatacgtgtgtcatggcggcttgttgagcctatcaacacgtcatctaggttttaagccccgcatgcactagctatatgtcctaatgctctccctcccctcaccctccacccccgactggccccagtgtgtactgttcccctccctgtgtccatgtgttctcattgttcagctcccacttatgagtgagaacatgcagtattcggttttctgttcctgtgttagttgtgttagtttgctgatgatggtggcttccatcttcatccatgtccctgcaaaggacattatctcatacttttttatgacttcatagtattccatggtatatatgtgccacattttctttatccagtctatcactgataggcttttgggttggtttcatgtctttgctgttgtaaatagtgctgcaataaacatacatgtgcatgggctttatttatttatttttttgaggtgaagtttcactcttgttgcctaggctggagtgcaatgacgtgatcttggctcaccacaacctccatttcctgggttcaagcgatgttcctgcctcagcctcctgagtagctgggattagctgggattacaagcatatgccaccacgcctggctaattttgtatttttagtatagacagggtttctccatgttggtcaggctgatctcgaacccctgacctcaggtgatccacctacctcggcctcccaaagtgcagggattaaatgtgtgagccactgcacctagttgtgcatgggtttttatagttgcataatttatattcctttgggtatacacccagtaatgggattgctgggtcaaatgatatttctggttccagatccttgaggcattgccacactgtcttccacaatggttgaactaatttatattcccaccaatagcgtaaaaggattcctatttctccacagcctcaccagcatctattgtttcttgactttataataattgcctttctgactggtgtgagatggtatctcattgtggttttgatttttatttctccaatgatcagtgatgttgagctttttttcatacatttgttggccacataaatgtcttcttttgagaagtgtctgttcgtattatgtgcccactttttgatggggttgtttgcttttctcttataaatttgtttaaattccttgtagattctggatattagaactttgtcagatggatagattgcagaaatgttctctcattctgtaggttgcctgttcactctgatgatagtttattttgctgtgcaaaagctctttagtttaattataccctatttgtcaattttggctttggctgcaattgcttttgacattttcgtcatgaagtctttgtccatgccttgttcctgaatggtactgcttagattttcttctagaattgttattttttgaggttttaccatcaagtctttaatccatcttgagttaatctttgtataaagtgtaaggaaggagtccagtttcagttttctgcatatggctaaccagttttcccagcaccatttattagatagggaatcttttccccattcttgatttttcaggtttgtcaaagaacaaatggttgtcgatgtatgatgttatttctgagatttctgttttgtgtcattggtctatatgtctcttttggtagtaataccatgctgttttggttactatagccttgtagtatagtttgaagtcaggtagcatgatacctacagctttcttctttttgcttaagattgtttttgctatgcaggctcttttttggttacatattaaatttaaagtagatttttctaattctgtgaagaaagtcaatagtagtttatgggaatagcattgaatctataaattaatttgggcagtatggccattttcacaatattgattcttcctatccatgaggatgaaatgtttttccatttgtttatgtactcttagttcattgagcaatggtttgtagttctccttgaagaggtctttaacatcctttgttagctgtgttcctacatagtttattctctttgtagcaattgtgaatggagttcattcatgatttggctctctgcttgtctattattggtgtataggaatgcttgtgatttctgcacattgattttgtacactgagactgctgaatttgcttatcagcttcaggaggttttgggctaagacgatggggtttcctaaacatagaatcatgttgtctacgaacaaagacaacttgacttcctttctttttatttgaataccctttctttctcttgtctgattgccctggccagaactcccaatactatgttgaataggagtgagagacggcatccttgtcttgtgccggttttcaaagggaatgcttccagcttttgcccatttaatatgatattggctatgggtttgtcataaatagctcttattattttgagatatgttccatcaatacctagtttattgagaatttttaacatgaggtgatgttgaatttcattgaaggccatttcccttgcagaattttcaaacagtttcttttcctacagagtggaaaatgtacttgcatccgtagtacgagattaatatgttgtcaaaattacaatcagtatgagtaatgctggtataatcccctctccaaaacaccacttaacatttttgttaaagccaacataagtattttgtgggtggggagggtgactggtttgcaaaatgtttattaatgaaaattaatgtgaaatattcctaatagcaattacccacaaaaatataaaaaatggaaagagaaaaaaaattataaatagacatttgtggtggttttaaatgggttatctttcctaggtagttgacagttaactagtttctgaatgttttctggacatcttatcagatgtataacaagatacctaatagaaatataatttatcttttaaaaagtcttttttgtcaactaatttgataacatttacagagcctatatgctgctactgtgagccaggaactgcactagcagctagagctgcacagatgaaaatgacagggtctgcttactcacagtgaagtggagtcagggcccaggaccatggaaagcttttaagaagagaagatacctgcactgaatctcaatgtgaaggcaaagtggagagaagccagataagcaggaaccagagatgaagtgtcttgtgcatcatgctaaagaatttaaattatattctgagtaaagccatttagtaattttaaatgagaaactgatatgttctggttattgattcataaatgtataatcttttactatattcacgagttattcttttttacctttgtcttcttagagtctagattgtaagaatattatatggcatcaacataataatttcatttctgaggtagggtctttcttccaaatagctgcttttgtttgctggttcattcgcatcaggaatatattcacttctcttatatttattttattttatttatgctttaaaaattattgtaaactggctttttcttgttttagtgtaaaagtatttactagtaaatttgcctctgaatgcaaatttggaaatatcatctatgtttgcataaacagttgactctggaaaaacaatctgggggttaggggcaccaacccctgcacagttgaaaatctgcctgtaactcttgaatcccccaaaatttaactactgattaagttgactaattaagcctacttgactggaccttaccaataatgtaaacatttgattaacatattttatgaataatatttttattatatgctatattattataataaagtaagctagtgtaaagaaaatgaaaatcataagagagaaaatatatttactacttattgagtggaagttgatcatcacaaaggttttcatacttgtcatcttcacattgagtaggctgaggagtaggaggaggggaaaaggagctgttggtctcgctgtctctggattgacagaggtggaagaaaatccacatgtaagtggacttgtgcagttcagactcatgttgttcaaggtcaactgtgtgtatattttttaccttttcttttaaacatttgtacttgcaaatttgctttgcccctgcacacagagatttgctttggagaaacttgtttttaatatctctatacatatgtgtacgttataaatattcacaaactatcttaagtattagataatctttttagttgatatgtctatttgatcattcgaaatcttgacataaatttttattttgtaaacatagattatacagttccctattttacatatttatatatttattaaatacaaatttaataagctttattggggtgataactaatgtaacacattatttttaacacattatttttctttggcaaaaagtaaattatctgtctctaaggttacatatgttttaaatcaactgtattcttactacatagttatatgaataaggtcctcaatgtccttatttatttctgctctatttttatttaagaaataataaagttgcatgaaattctacaagaatgaagatatttctctgaaaaatagttacgagaattgtaagctttattaatattgaggatttaaaatcctattaatatatacttatttactcatttattttttggccttgatttttaccatgcctgctatacatttgccaactctatttttttcttttatttacatttctgctatatatttgcccttgtccttttatcttcacttctctatattaccgtattttacatgtattatttaaatgccatcagctgaggtcaatggataaatactatgtgacctattgttgatattatgaattaagacactttttatacatattattatatagtatgatcattgtagtatgaataaagaggactttatatttactctctacataagaatctggaaaggtcaatcgattcatttttctttataaaatataattaaaaccataatatattatggtagtctttccattatgttcacagtgtccaaaacacaaaatgttaccactataaagaagaaaaaataataataaaactctttctacaagttagggttctttatttctaaaattaatttttatcttgtttaaagaaaacgtcacatcaatatttgacctgtgaatttagtatcaagcctccactttctttttctcttttctacacatttccttttcttctctcattcagaatttgattattttttccctttctcataaaaaatatttacacttagagaatgacaatcaacattgctattatcattatatttgtggactttcagacaccatgaggcatgaaaagaaacattggtggcagcattattctttctttgtatctctgaattcatacaaaatatatattgatccccttcacaataagtacattgagttagaagcctgcattttggttgaggttacaattctaagaaacttacattgtttgagcattatgactgttctacaatataattatgttttaattaatcaattgtaaagcaaatacattgcctaccataaaggtctttatcctctcaaattttaaataagttaaaatttgctaatcaagtttaatccttgtttataatgtgccagccctaaattttttattatgatgttccagccacttaagttacatggtttttaatcatgaatattgctgatgttgataataatgtgaaaattgacttgtgactagattttgtcttcttagtaataaacaagccaatatgaaataagaagacaaagaaagagaggcggactaagaaaagaaggagaggaaagaggaaaacgtttaattttgattttgatttacttcaaactcaatattttatttactcattacggtgtattcactttctctggatttcattaggaaataattaaatgtttcatattttattgtctcaatcaatgccccctatttctaaagcagatttagatttatagagcatttgtgaactaaaaagcatttcaaaatactaaattgtatagacatttgataagacacataggaaaaaatgtaaatttatgtaaatcagtgattttggtattattccatgaataaaaaaggaaaatcagatctaggactctttctataaggattaaaattcatggtctaaattttaaattaccaaaaatttatttatcaagaaaaattttttctggaatttagagtttttattttatataagtaagatttaaaacaacattttgttattttttaaaagaccataaaaatggataatttggtatgatatttaacatctttcttccacatctaatcttttttgaccctttatagaagttctattattcaccaaaaaattgtgattatagtgactgatctttttaaaagccatttttacatgaaagtgaaacactttatgtaaactttcaaatatttttccaatgtccaagcattgtgaacatttcaaacctaaatatatcctaaattacaagggatattgtaatgtctgcaaaaaggtttaaatatttttatttttgtactagcttaaaattagtcactaaattttctcctccaaagtaatatcttacaaagtttaattaatttcaaagatttctaactgaaaagtatatattaaaagagttgccagcccctattttcagtatacatgaaattacttaaaattttttgttagtttaatgactgtagcttagcattctaaaagtttaaaaagaaaaccacagttatatatattgcttattatgcctttataccaggaacaaaaatatgtgtcttaaaacattgtaatttaatagtttttactgttcacaatctgtattttttaacaatacacttccaaataaatcagaatttcaaagttcttgaagtatatagaccattagtggttcactgcctcacgctattcctacctacacacccctttctcctaacacatgcatatactttgcaaactacttgaaagcaggaattatctgaatcatctttctattttacaacacaattaataaactgctttcaaggtaagtggctgaaacaatgacttaatgttgtttcccattaaaatgtattggccagggatggtggttcatgactattcccagcactttgggaggctgaggcaggtggatcacctgaggtcaggaggtcgagaccagcctggccaaccaacatggtgaaaccccatctctaccaaaagtacaaaaattagccaaacatggtggtgcacgcgcctgtaatcccagctactcgggagtctgaggagggagaatctcttgaacccaggaggcagaggttgcggtgagccaagatggcgccattgcactccagcctgggtggcaagagtgaactctgtctcaaaaaaaaataaataaataaaataaaacattgtattataataagggtaaaatctatgtggaatgataattaaaaagttatccttatgcattaataaatacagtatgacctttgtatttgcgggttacacatccatggatttaaccaaccacgagtcaaaaacatttgataaataaatacatctatactaaacatatacagacctttttttcttatcattattccttaaacaatataatataataaacatttacacagcactttcattatattaggtatgaattatctagggatgtgcatggcttatgtgaaaatgttatgctattttacattagggacttgagtatgagaggattttggtatccctgagaggtcctagaaccaactccccacaaatactaaggatgactgtagtcatatataattttcatcagaaataattatctgttatataactatatatgtaaatgagaccattaaatgaaatttgtgttattttaaagtgggtcaagaaaagagcataatatctacatatcctcttgaaaactaaagaaaatatatgtaatgtaattatacataatacaatatataaactcattttccattttatatgttatacgttatataaattatatatacattatttgcattttcacataatctgtaaagattttattaaaatctcttttcaggcaaagcgagctaataacaaataataaagaataaataaagaaaataatgctgtactgtgtagttagagaaaatggcttttgtattcgaaattatttttcagttaatgaaacagataaaaattttgattaatacaacttattccatattttacaggaaatattgatgaagcagaatgggagtggaaagcaggattccatcgctggaacaattacatgatggactggaaaaatcaatttaacgattacactagcaagaaagaaagttgtgtgggtctctaattaatagatttaccctttatagaacatattttcctttagatcaaggcaaaaatatcaggagcttttttacacacctactaaaaaagttattatgtagctgaaacaaaaatgccagaaggataatattgattcctcacatctttaacttagtattttacctagcatttcaaaacccaaatggctagaacgtgtttaattaaatttcacaatataaagttctacagttaattatgtgcatattaaaacaatggcctggttcaatttctttctttccttaataaatttaagtttttccccccaaaattatcagtgctctgcttttagtcacgtgtattttcattaccactcgtaaaaaggtatcttttttaaatgaattaaatattgaaacactgtacaccatagtttacaatattatgtttcctaattaaaataagaattgaatgtcaatatgagatattaaaataagcacagaaaatc

SEQ ID NO: 104 - DNA, 9908 bp, Homo sapiens
cgtcccagatcacccattccagaaatgtgaaaccgggccctcacaaagtcgtctctggtgaagaggtggcgtgcggggtgggggttggtggagggtgaaggcataagcaaacatattttaaaatccagatcgtaggaagtgtcacctggcccctcacccaggcatgctttctgggggaagcgcagggccaagctttccctagaaaagctggggcgaagagagagcaggcggcggctaaggagctcctggcaggctgggaaggtggagaagtggggtgaggtatttttctagaaagtgtagccctagctcatctcctagattggggaagagggaactgagggaggagggaaggagacccagggcagctccaggatagggaaatgttgaagaagggactgcgttctccaaccgaaccctccctcctgggaaccgcagcccagcgcggtaactgagttaccgcaaccgggcggtggggaggaagggtggtccaggaaaccggcgagggagaaaagcggtggaagggagagtcttctccctggagcggccccagcagtacaaagtgctggtcacagcgccccttccgcccctagattgacgagcagtggcgtggagccagcgcggaggctgccccctccccctcccgagcccgcagcgcggagcgcggtttagcaccaacggagccgggggcggcgtctttgggatggaaaagggccaaaggggaggagtggggtgggggtgggggtttcactggtccactataaaaggaccgctcggctgcccggttcttgcactcgctggaaagcggctccgagccaggggctattgcaaagccagggtgcgctaccggacggagaggggagagccctgagcagagtgagcaacatcgcagccaaggcggaggccgaagaggggcgccaggcaccaatctccgcgttgcctcagccccggaggcgccccagagcgcttcttgtcccagcagagccactctgcctgcgcctgcctctcagtgtctccaactttgcgctggaagaaaaacttcccgcgcgccggcagaactgcagcgcctccttttagtgactccgggagcttcggctgtagccggctctgcgcgcccttccaacgaataatagaaattgttaattttaacaatccagagcaggccaacgaggctttgctctcccgacccgaactaaaggtccctcgctccgtgcgctgctacgagcggtgtctcctggggctccaatgcagcgagctgtgcccgaggggttcggaaggcgcaagctgggcagcgacatggggaacgcggagcgggctccggggtctcggagctttgggccagtacccacgctgctgctgctcgccgcggcgctactggccgtgtcggacgcactcgggcgcccctccgaggaggacgaggagctagtggtgccggagctggagcgcgccccgggacacgggaccacgcgcctccgcctgcacgcctttgaccagcagctggatctggagctgcggcccgacagcagctttttggcgcccggcttcacgctccagaacgtggggcgcaaatccgggtccgagacgccgcttccggaaaccgacctggcgcactgcttctactccggcaccgtgaatggcgatcccagctcggctgccgccctcagcctctgcgagggcgtgcgcggcgccttctacctgctgggggaggcgtatttcatccagccgctgcccgccgccagcgagcgcctcgccaccgccgccccaggggagaagccgccggcaccactacagttccacctcctgcggcggaatcggcagggcgacgtcggcggcacgtgcggggtcgtggacgacgagccccggccgactgggaaagcggagaccgaagacgaggacgaagggactgagggcgaggacgaaggggctcagtggtcgccgcaggacccggcactgcaaggcgtaggacagcccacaggtagaagaattgctctcgtttgtctgtccattcatcctcctctcctcactttatctatcccacgcgacttcagggtagactcctgctggcaggcaggatcataagtccgcggacagaacggaggcctggagtggaggaatgtggtttgaggtttggattggtgaactcagctagaaaacatacttgcatttgcccgaataatgaataaccaagaaaaaaactgacaaacgattttctgcaaactaaagcaaagcatttaggccggggagggagagtttgtaacctgactccttccacctttagcgagttggagcttgtgcgagttctttccactctgtgtatttctttttaatgattttgtgtgcgccttttgtgcgggttgcaacgttgcgctgagttttgtaaccgctgcctgtgcgtgcatcctgcgctcacgggagggcggatgtggagagggcagaggagcaatggtgacctgggaaggtaccctgagcggctacgctaggatctctgttctgcagacttctgtcccctttcccccttataaggctgacccaggcgggctgaaggcggtggggccccttcgcagaacctgcttgggaggtctttcccgggtttgccccgcctcccagtttgcactccctctcgcggccataattctgctctcaagcactgttgaaagtcactgccggtccttcctgctacggccttctctctgtgcagtgcttattctccagttctttttgtttcatcactttggtgcctttttccttctttaactctctcgcgtgtcattttttaaagaattctccccttttcccctgctcctctgctcctgggagcaaagtggtcgcagcccagtttaggactttctgcaggggttgggtctcagtccggagtggaaggctctgttccaaataatcaatcatgcctggaagctggaacttatttcgctggggcagtgggagtggggccagaggctgctgggcagagtgggtggtccttgtgcccggaattggcaagagcggagcaccccagggacccctggaatgagacagcagagctgtgcagtctgagattccttaaggcccggccccttggcagcagcccaggccctacccgaggccttccacgtggagcctgatgatctcattcaggatttgagccctcgcctgtgaaagagtgactcagggcctctgcctgccgctcttgctccaagattttactacaattgggtaggattatgtgcgaaattgccttgttcagactgtgggatttcaaagagaacagaagaaatcctgctcacacacagaaagatcctgaccatgcaaaggagcgcgtggtctttttatttaaaggagaggagagaactttaaaaataacacttggagtgaagatatgcaaatatttttgttattgttgttctgggtatatttttgctttgtttgctttgactggttaggctttcctaatatatgctaggaaggtaactattcttggacagcctgaccataagcaaacttttttttttctttacaggaactggaagcataagaaagaagcgatttgtgtccagtcaccgctatgtggaaaccatgcttgtggcagaccagtcgatggcagaattccacggcagtggtctaaagcattaccttctcacgttgttttcggtggcagccagattgtacaaacaccccagcattcgtaattcagttagcctggtggtggtgaagatcttggtcatccacgatgaacagaaggggccggaagtgacctccaatgctgccctcactctgcggaacttttgcaactggcagaagcagcacaacccacccagtgaccgggatgcagagcactatgacacagcaattcttttcaccagacaggtaagaggaagatggtaccagctgtgagactgtcctcttaggagtctacgttgtaccaaaaagatatatacaaggcatttcaccagtgtttttgcagttaaccttttttaattggctagcatggtttatcttactcatttctactgtaatttaaatatctcaagtttcacagttctattttaaaagcattagaaaaaagcttgattaaagtcacatgaagtcttcttatgtcaacaataatgaatgtagatgctccaaagcatatgtgaaggcacaccctgccaaaaaagttagatcccaagggtcatgctccccttattaataagtatttacctttgctttttgtaggacttgtgtgggtcccagacatgtgatactcttgggatggctgatgttggaactgtgtgtgatccgagcagaagctgctccgtcatagaagatgatggtttacaagctgccttcaccacagcccatgaattaggtaagtctgcttcaaagtagaagttaagctcaattcagaaatgtaaactggtaaaacaatataagaaggagagtctgtaggttatattgctattttaggtcctagtgcatcttagaaactatagaaaatattttgtcactatttcaaacatggtcatttttattaaagtaaaaaataagatagtagtagctctggacatttggaaatgtgtatgtttgtttacaccctgtgaaaagtagacatggtctgcaaaagagccaatctcctaaatatatttctttctctagaaatgttattttgggacaaatgaatgaatccctgttgggaaaaaagaacctgctgcatatcatccatattttattttattattattttttttgagatggagtctcactctgtctcccaggctggagtggagtggcacaatctcggctcactgcaacttctgcctcctgggttcaagcgattctgctgcctcagcatgcccagtagctgggattacaggtgcatgccaccacacccggctaatttttgtatttttagtagagacggggtttcactatgttggccatgctggtcttgaactcctgacctcaagtgatccacccgcctcggcttctggaattacaggtgtgagccaccgcacccagccatgatccatactttaatgtgggttctggattgcttcctaggccacgtgtttaacatgccacatgatgatgcaaagcagtgtgccagccttaatggtgtgaaccaggattcccacatgatggcgtcaatgctttccaacctggaccacagccagccttggtctccttgcagtgcctacatgattacatcatttctggataatggtcatggtgagatattccagctactctctctagatggcatccaacctttcacgcataaagtttagttaaatgaactctttcctttttgttctttttattttccccacttcaaaattacttttcctctgtcaagatcctaactgttgagatcttaattccaaataaaaaatagtgcttccggttgagtagctcccaaagcccattcattcacattgttcgcagatcaataacttcctgtcattgttaatatagaaataccccattgaggataagatcttaatagtaatctaaatctcttcagcatttccctcccccagctttacagttttcagatcactttgctgtctattttctcatatgataaatattttctgaaatgggatctaccccttcatgccctcactaactctgtattgatattggttggcatttcctttgcaggggaatgtttgatggacaagcctcagaatcccatacagctcccaggcgatctccctggcacctcgtacgatgccaaccggcagtgccagtttacatttggggaggactccaaacactgccccgatgcagccagcacatgtagcaccttgtggtgtaccggcacctctggtggggtgctggtgtgtcaaaccaaacacttcccgtgggcggatggcaccagctgtggagaagggaaatggtgtatcaacggcaagtgtgtgaacaaaaccgacagaaagcattttgatgtgagtttttctactgaaacacattcagaattgaaaagaacaaagtgatggtaaaagatatgataccaagttaaacatccccatccgtgtcctctagcaggaatgcgagatagcttatttttagaactgattctttgtcccatgtggctttctttgataccctaaaagttctctttagataattctaatgctgatgatttatgtctccatttagacgccttttcatggaagctggggaatgtgggggccttggggagactgttcgagaacgtgcggtggaggagtccagtacacgatgagggaatgtgacaacccagtcccaaagaatggagggaagtactgtgaaggcaaacgagtgcgctacagatcctgtaaccttgaggactgtccagacaataatggtgaggagcaacggactctggttttaagaaactggattaaaaaaagatgtacccacaaacaggtggctcaagattggaaactgataatgttatcatattattctctttccaggaaaaacctttagagaggaacaatgtgaagcacacaacgagttttcaaaagcttcctttgggagtgggcctgcggtggaatggattcccaagtacgctggcgtctcaccaaaggacaggtgcaagctcatctgccaagccaaaggcattggctacttcttcgttttgcagcccaaggtagttcgtttttaccttatttttacctaaaaatcaaggcctgggcttgctaccttttcaaacaatttttgttatactttctttgctttccatattaacatatcttcaatttcaaatttgaactccttttcttttacattaattggcaactgcctgctttgagtttagtgttttcagttatgaatgaagcttaaatctaacacttcacatgcttgcaattgctcgctattactcttttatatgcaaagaaaagctttttggacagtcaagcgctcctctgtgcgactaggcttcacatacagctcatagttagatacattttatattcacacagtaaccagtagttttggaaaatagtctatgcatggtccaaaatacttgttactgggtaactagcagtagcaggtgcaaacagaataatagaagtggtagtctgagtattgattatttttatgtttgaaaacacatattgaactaggaaaagcatcatttcttttgctgttttgctaagggaatacatctggatctgagacagaaaatggaatttaatgtgattgagatgatcgtgtgtcattagcaccataggctatgaaaatattcccaagttgcagattcaatattcagcaagtgatttctgaagcacttactcttgccagatactaattattctaggctctgaagatacagcagtaaacaaagtgacaaacagctctactttcattgaccttagctggaggagacataggtcaatagataaataatttttaaaaatatctaatttcttcagatgtctatacgtagtactgaaaaatatgccaaagtgaagggtaaatgcatgaaatgcataatgtgtagagggtactgtgtttaattagcatggtcaggaaagtagagagaaaatgtttacacttatcattgcagcatctccttcctttgcttgtatgtaacactagacatgtgtccttttttcaggttgtagatggtactccatgtagcccagattccacctctgtctgtgtgcaaggacagtgtgtaaaagctggttgtgatcgcatcatagactccaaaaagaagtttgataaatgtggtgtttgcgggggaaatggatctacttgtaaaaaaatatcaggatcagttactagtgcaaagtaagttttaaaacacctatttgcagaccttataatttaaatgggcctttcaacaggtctgggaaaaaaatatgtctcataaaagattaatgtgtttttaagctaaataatctaattagccaatgaatcagagatttatgcctgtttttgtcacctgcagacctggatatcatgatatcatcacaattccaactggagccaccaacatcgaagtgaaacagcggaaccagaggggatccaggaacaatggcagctttcttgccatcaaagctgctgatggcacatatattcttaatggtgactacactttgtccaccttagagcaagacattatgtacaaaggtgttgtcttgaggtacagcggctcctctgcggcattggaaagaattcgcagctttagccctctcaaagagcccttgaccatccaggttcttactgtgggcaatgcccttcgacctaaaattaaatacacctacttcgtaaagaagaagaaggaatctttcaatgctatccccactttttcagcatgggtcattgaagagtggggcgaatgttctaagtcatgtgaattgggttggcagagaagactggtagaatgccgagacattaatggacagcctgcttccgagtgtgcaaaggaagtgaagccagccagcaccagaccttgtgcagaccatccctgcccccagtggcagctgggggagtggtcatcatgttctaagacctgtgggaagggttacaaaaaaagaagcttgaagtgtctgtcccatgatggaggggtgttatctcatgagagctgtgatcctttaaagaaacctaaacatttcatagacttttgcacaatggcagaatgcagttaagtggtttaagtggtgttagctttgagggcaaggcaaagtgaggaagggctggtgcagggaaagcaagaaggctggagggatccagcgtatcttgccagtaaccagtgaggtgtatcagtaaggtgggattatgggggtagatagaaaaggagttgaatcatcagagtaaactgccagttgcaaatttgataggatagttagtgaggattattaacctctgagcagtgatatagcataataaagccccgggcattattattattatttcttttgttacatctattacaagtttagaaaaaacaaagcaattgtcaaaaaaagttagaactattacaacccctgtttcctggtacttatcaaatacttagtatcatgggggttgggaaatgaaaagtaggagaaaagtgagattttactaagacctgttttactttacctcactaacaatggggggagaaaggagtacaaataggatctttgaccagcactgtttatggctgctatggtttcagagaatgtttatacattatttctaccgagaattaaaacttcagattgttcaacatgagagaaaggctcagcaacgtgaaataacgcaaatggcttcctctttccttttttggaccatctcagtctttatttgtgtaattcattttgaggaaaaaacaactccatgtatttattcaagtgcattaaagtctacaatggaaaaaaagcagtgaagcattagatgctggtaaaagctagaggagacacaatgagcttagtacctccaacttcctttctttcctaccatgtaaccctgctttgggaatatggatgtaaagaagtaacttgtgtctcatgaaaatcagtacaatcacacaaggaggatgaaacgccggaacaaaaatgaggtgtgtagaacagggtcccacaggtttggggacattgagatcacttgtcttgtggtggggaggctgctgaggggtagcaggtccatctccagcagctggtccaacagtcgtatcctggtgaatgtctgttcagctcttctgtgagaatatgattttttccatatgtatatagtaaaatatgttactataaattacatgtactttataagtattggtttgggtgttccttccaagaaggactatagttagtaataaatgcctataataacatatttatttttatacatttatttctaatgaaaaaaacttttaaattatatcgcttttgtggaagtgcatataaaatagagtatttatacaatatatgttactagaaataaaagaacacttttgg

SEQ ID NO: 105 - DNA, 61635 bp, Homo sapiens
aaaacagaaacaaaaaacaaacaaaaaaaccactaaatttgaaaaatgttaaatcaacttctttgctgtattataaagctccatttccacccctctttttagtttaggaagtttaccgttatcggtgaagtaattattttgttaattacaaaggtaagtaggttctttctgaacaatcaggatgtaaacttaatgctagtgaagtaattaaacattttgaatgttaattaaactcagtccagttaagggttttatttactactaacaaacgtattcaccgtgtgctaagtgctgcagggaatcccagcccgttttcctccatctaaaaggaaaattaggaggtcccaatactttacttgtagattttccagtttctaccattccctgtaaggcactgagacgcaagatttcaaggcccactcggggtaccctggcatggacatcgagtcgttctagcgctgagcttcaaaactattcctttccttccctttcttcttcataccagactctaatctgttctccctagcttcgaattattcactgtatggtcgaacatcttactccacaaataacctctgaagtgttgcagttgtcttacccaaatacctgaactcagcttgtcccgagtactgcgatcccgcgtactgctaatgggaatatagttaacccaactagtatgaggtccccagtacacagcagctccaagatcaaggcgaccgagtaacactgcttgcctagactcaggccaagttcggagagtgatcctggggttattttagaacgtgtcccttgcttcccagaaaaattcagtcgttaactcaagtccagatgcccaatgaccattcggataaggtgagctaaagcttcaatgccttgaggggcttggcagggctcgggctcatcccggagaagcagccccgctttccagactagcagttcccagggatgggtgtgtgctaatcgcaggccaacaagcccagcgcggtacagaggtcccattgtgaccggaggcgagaaaccccgcctcggcaccctgacgcagcgcaggacccgccccgcgcgtgacgccagcgtcaggccagccccggcatgctctgcggccgcccgcggtccagctccgacaacaggaattttctccgagagcgggccgggctcagttcagctgctgtccagacccggatcggcaacagtgccgcctccagacgttctcctgccgctcgcccgcccgtcccagcgcccccagccctcccgcgagggcgccccgggacggaaggatccaccagtctgtcggcgcccgccgttctcgtggtcgccgtcgccgtcgtcgtggtggtagtctccgccgtcgcctgggccatggccaattacatccacgtccctcccggctccccggaggtgcccaagctgaacgtcaccgttcaggatcaggaggagcatcgctgccgggagggggccctgagcctcctgcaacacctgcggcctcactgggacccccaggaggtgaccctgcaggtaacgcccacacctcagctctgggtctcttatgcccctcacgcggctctgggggtcctcaccacaatcgcctctgtcccacgatgaccgaggaggacctagggcaacatctccttaagtctattgggaagtgaccctgtatttcccctcacacctaggagggtcactcccccttcccgtcgcagttgctctttgagattgacctgaggcacattttctctttctagaagccgctgcgtaagtgacggacccatccacggggggagattcctgctgatagttgcccctcctcccactccccagtccacggtcactgcaaaatgaacctttccactccccttgcacggggtcctcgtctacctcctcccctcccaccagtaatgcagtcattaatcctctctgatctttccttcctctcccctccccctgcgatgtgctttcattgatgcctcacactgcgttttgtcttcccaaaccctagcgtactcaattcccaaagtaatgaccacgaccatgcatcgctaggtcggttcttaggcagcaccacacacattgttttgtttgagtcgatatttctgaattattaaagtcgtcttactgaaattaatacctgatactagaaggagcagtggcttgtgactgtttccttttcatgagacaccgtgttgatagagaaaaaattgggaggaaaaaaatccctgagactctaggagttttctaataagttggaagttatgatttccactacgtgattttttttgaatactaatctgtttttagctttagtttcaggaactagatacaaaaatagatctctttttctccttttcccttgcaaacaaaaaaaaacagtaattttcaagattgggatatttgggatttgttctaaatctgagcaataatgtaagaacattcatttgaattagccaaatcatctgcctcgttttgatgactaatttattcaccaatatttgttgatttatttgctaaattcttcgctaaactagccagccacccacacaaagatgaataaaacatgagcagtgcctagggcccagaacagttcctgacacttgggttttcatgtgttagtttcagttcttattacctagaagagtttttaagcagattattttaaaggacccgtatgttttggagaagaaacttgttagacaacaaattttgaaatttaagggagtatttgttagccgagaatataggaaatagtgaatccaaagtgatttttatgtcatttaaaaaatatatttcctttaaaggaaatgtgtcttccaaattgaaattcagtacttgtttagtttatcaatttgtttgtattttattatataagactctaaaatttattaagatgatttgttttctggcagtcacttatacataaaacattattaattaaaaagtgctacttcctggtaaactctagtgttggcagatcagttacttttaagcagtgactttaaagtttaaagctttgaagactggaatttcctttgatgtatttgtctgtagaatagtaataatagctactgtggggttagttaaattattttttttttatcttagtcgcccgaacaaccatattaggtaggcactatcattttaggtgaaactcagtgaagtaagccaggatgtaggtaaaaaagggcaaaatgtagtgacattaaactgtttttgcttgttggaaagtaactacgtgtgtttaaatcttggtttcttgtagcaacttttaacctaaagacctttgggtttataatccgaatttttaatatttgtaagtgcaggtaaatactaccatttatttttccctaagatgattattagttagaaatacattccctccatgtgcaagcaaagctttggtctagaagctgtcctaaaagcatctgctaagctgaattgatgattattcacctttcaactcagtagatctggctccttgcattctaggtcattgcaaacactactttcataatggttcagaatttctttagtaaatctcaaaggaaatattttcttttgagattttactgtatttcccttgaaatagataagaatcatacctcacatttcagaggaagtatgtattatatagtcgacagagtataatgtaattttagagcagtcgagtatcagtaatgtagcctgtttttttctcagtttttttctaacatttttgtatgtttaagatatactttaaatgtactttagaaacttactgtagtaatacttatctggtgattgattattcctgcaagctgaactatccagagcatatcagaaaataaaaagaaaaaaacaagctaaaaaagacttactagagtcaaaatgatagaaggcccagtctttgctcagaatttgtgggtacatggagtaaatatatctcattttagacagaattcctgttcttactagattaaaagaataaattataaaggagatggtgaggttttcggagtatagtagcagaataggcagagtaaatctaaaacaacaatacagccacagtgctttgtatttaataatcctttactgtttataaagcactttcacatgcattctcccaactatcctgtgaggtagatgtagacggtactgttaatatgtatcatatagttaatgaaactgaatttgccgtttacaaatggcagatctgagatgataaaccatcttatgaattattgttctatgaccaagagttttgtttgtatattatgatttaggcagggaaggtgcttctgtataaaattaatttcttaaaagctttggctcataaaaagattctgctttaaagttcccttgaacataaatttgcattacttttttcatatgtgacaccattttaggaaaaagggattacttaagctttccttcacgagttacttttgttgtgtaacaactgtttaacttatttgaagattttgatttttaatttttatacttttctttggagagtcatcgtataaaggaataaagaatcaagtcagatctcaggtccataataattctcaacggactcttaaaattgtttttcattttctgaagagctgatgaattagtgtttggaatattccagttatgttgtctcagggtctttctgtttgcagtattaagcaacgttgtttttctcactaacttgtcactatgaatttttccattacttgggacttatagtagataatggcaaaggcttcataggtaggaattaataccgtaattattatttaacattacaaaactaatatatttattcctttgttgggtctaaatgagattgcttgctatatggtaccttatagcaacttagcttttcaataacagtgtgttacagtgctcaagagcatggggtttgaacacagtgctagttttgagtccagattctatactttactagctttgttactctggtcaaatcattaaacttcctgtctcagtatcctgagctgtaaaattgatccagtagttgtccctacctcaatgggttattgtgagggtaaaataaatgctgtctttcatgataattattattgctgctgagcacctactatatattggatacttgaatcaaaaaacaaatatttgctctttgaaattcctagtccgatggggaagacaaataagaaaattataacaacgtaatgtttatggaatgaacattcaaatttagttcacatgcaaagattacccaagaagtttaaaaaatgtactgttctttctgctttactacaggtttttgcctgttattgaatgcatattttaaaaaatcttttcatcatttttttaagcatatgtattctatcatggaaattaatctttgtgttaggttgtgtagctacacagcagttttcatatccttcctctttctaacagtgttggaggtagttacctaaataatctattaaaaacctgtaactcctcttaatattgatagttgatattttatattggtctttgccttaaaggaagaagaaaaagccagatctatacaattgctgtgttaagttatgtctccactagtgttctgatataataattgattttcttttctgtttttaaaaagatgagtttgttcctttaagcagtagcttctgaaaagtcttaggtaagctaatgtagtaagttacggctaattttttaatatattaaaaaagtaaacaatatattagtttactttccctaagattataggaaatcttgagtcctgtagatacaaataaggagtcatggtttatattcagtgtaacttttaatgttagtgattacatccagttttctgtttcctattccctccctgtcttcagcattttagaataataaagtatataatgtttaatagacgcccatcaaaaacatgaaatatttgttaggctcccatgtattttattaagatgtgactatgaagacaggagcctaaagtgctagtttgttttcctgtataatagccatgtaacttggactacacaaactgcgtcacatctttttggggactgagcataatgtggaaagaggatggtttttgaatattatttccagccatttataacctttggcaagttttaaagtctctataaaatggtattaccttggaaagtagtcatgagaattcaatgaaatacctacaattacgcatcgcatgttttggtactacgttcttccacctctcatttccaattctcccatcccaactgagagaattgtgagctcctaaaattcagtaattctgacatgtgttttttgtactagctgtaatgctagttttcagtaagagtccttgtacaactaactgtagcacaaggtaggcatagaagaacgtaggacagaaggcttcatagaggtgggggtacctgagctaagctttgaagggtagatgagatcagattgaaaagggaaacatttctgagcaaggaaaactatctcacaaaggcaatgaagctagactttgagtagcttactcatcatttaggacatcatgggaagccactggatatttttctttttgtattttattttattttattttattttttttgagacagagtctcgctgtagcccaggctggagtgcagtggtgtgatctcagctcactgcaacctccgtttcccaggttcaagtgattctcgtgcctcagccacccaagtagcttggattacagatgtgcgccaccatgctcagctaatttttgtatttttagtagagtcggggtttcaccatgttggccaggctggtctcgaatgcctgacctcaagtgatccacccacctcggcctcccaaaatactgggattacaggcatgagccaccgcacctggcctggatatttttaagcaggtaaattatatcatgtattagagaagtgacaggcaacaatgtagagaagggttgtttgagggaaatgttttaaattgggaaataatgatcactcaggacattggttttgaaactagtggttaccatacattaataggatgccaaatcaatatagtgtcttgagaccattacagtttaaaaagatgagttagaataagttatggtagaggttacatcagacagagccttgcaagtagtaaggtaagtactcttttttttttttttgagatggagtttcgctcttgttgcccaggctggagtgcaatggcgtgatctcggctcaccgcaacctctgcctcccaggttcaagcgattctcctgcctcagcctccagagtagctgggattacaggcgcctgccaccacgcctggctaatttttgtgtttttagtagagacggggtttcttcatgttggtcaggctggtctcaaactcccgacctcaggtgatccaccttcctcaacctcccaaagtgctgggattacaggtgtgagccactgcgcccggtggtaagtattcttttgtgaagtgtgctttagttttatgtaaaagtgtctatgtacatattatatcaaatgataaatatatttcttcctgtgtattgcatttaaaaagtttgagaaaataatttgagagagactgttgtgttagtccagacaagaggtgctggggcccagattaggacagatgagatggaaataaggtacagatttcacatttcagaaaataaatgtgcaggacttgtcaattgattacaggttagggaagaaagaagattaaggtgttttttgtaggggaaggagtggatgacaaagatagggaagtagtagaagacctttaagaaatcagaggttctatttctctttattttgttttctaaggagttattttactctttgatataccagattggctataaatacatttttaacattcttttaaaaattgtgaaaaacagcaaacatatagaaaaatggatgaatcataaattgttgtaaaacatatacccaccccaacccaggaaaagaaaattaatttccagcaaccaagtgtcttcattttccttcatagtcttgatctctccctccctctagtggtaatcttaatagcagattttttttttttctaattaacaaaatagaatgttttgaattaattctgttttgaaaataagtactctgagaaaataataagtgcatgaaggtctttgtacaggaaaccgtatgaacatgaaataatttagttttactaaaaggttgtaccacaatattatattaaaactgaataggagaaaaaaatcaatttcctatcatcaatattctattcacaaccgttttatttttattaccttctacttctcctaaacatattttacatagttgcaatcatacgtataattttatattctttttttcactagccctttataaacattttcccatgtttgaatggtattgactataatttttgatagtcacaaacctaatatttgatgatcatgttaaacataatgtgacttagttattatttattattttttaaatttttacttttttttttaagagatggggtctcatactgttatccaggctagagtgcagtgatgctatcatagctcactgcagccttgtactcctgagctcacgcgatcccttctacatcagcgtccagagtacctgagactaaaggtgcatgcctgcctaatttttaaattttttgtagtgatgtggtcttgctgtgttaccaggctggtcttaaactcctggcttcaagtgatcctcttgcctcagcctcccaaagtgctgggattacaggtgtgagccactgtgccttgtatcagtgttttgcctctttttgaattttatttaatggcatcatatgaaatatgtgtttttttaaaattttggtttggcgtatgcccagattttgagagatttattcatgtgtatatagttgtagttcttttccatgaccgactagcattccattttaagaatatacctcaatttatatgtctcctactgttaatggacacctaggttgttttcatgttttggctatcacaaattatgcttcttacaattatactttttttgaacacgaatatccatttctgttaagtggatacctagaagtagaatttctgagtcatctagttgtgtattttcagctttgttagacactttcagttttctgaagtgattgtcccggtttatattcctaacagcattatgtgagagtttcacttatggtatatctttaccaataattgctattgtctgtctttatttttttctttcaccacgttggccaggctggtcttgaactcctggcctcaagcaatccacctgccttggcctcccaaagtgctgggattacaggcgcaagccaccgcacccggcctgttcttttcttttggtctgttttgtccgttactgtagcagtaccactctgtgtggattactctcaatcattgctacaggacttggtatttgatgtagttattataggctttggtgtaggactccagctttgttcgtttttaagattgccgtgactattcttgactttttaagttgccatataagttgtagactcaattttgggattcccacaaaagaaactggataggattttgattatattttgtggaatcagtagataaatttggggagaagtgaattcttttaacaatattgaatcttaaaataaatttttaatttctctcaaacttttgaagttttcactgtggagatctcacgtgttttatttgatttatccctaggtgttgacgctttttgatattattgtaaagggtatcatttaaaaaattactttattgttggtatataggattataattaattgctttatactgaatttttttcacacactctaaaggtttttatgtagattattttgtattttctctatgtataatctgaaaataatacatattgctgtctccccttctgtctttttgtcttactgcactagtaaggacctctctaacacacttgaaaaagaagataaaaggtgatagtggtcatttttatttcccagtcttaaggagaacattttcaataatttattgttaggtatgatatatgctatagattttctttaatgactctaccagattaagcaagtttctttttattcttagtttgttaagtattttcatcatgaatgatgaatttggccaaatgttttttctgcatttcatgatgattataagatttttcttaatttttctcttattgaggtgaattactttgattgaaaaaaaatttgaatgctaagtaacctttgcattcctggagaaaaccctatttggttgtatatagtctcttttttattactgtatcaattgctaatattttgattaggatttttgcagctctgcttatgaaagagattggtttgtaattttcctttcttatagtgtccttgacaagttttggtaccaagttcagaggtgtttcttctttttctatttttggaagagttgcttttaataatacatgtttaaggtctgtagtgaagttcatttctttatcatttgtgttgctttattgtcttcatacattttgctaagaagttatcaactgtattaatcttttcaaagaacaatttttgtttgttttgaggctgggtctcactctgttgcccaggattgagtgcagtggtgcgatcatggcccactacagcctcgaccatgtgctcgccccatgcccggctaatttttgtatttatttatttatttatttgtacagatgggatttcatcatgttgcccaggctggtcttgaactcctgagttcaagtaatctgctcaccttggcctcccaaagtgttgggattacaggcataagccatcacatctggcccaaataataatttttgactgttgagtttttctattttattgatagttttgtccttcattatttccttcctaatcgttttttgaaggttgattggctgttatttttctagcttcttgagctggaagcactaattttttgccttttaaatttctattattcattacatgtctttgtaagtacccacaagtcttgacatgtgttggaaaaggcggtctcatgcacacagcctttccaccccttctcaccaaataaaaatgggccttgggcctgaaacactttcttaccaagcgatagagtcctcacagcctgtgctggacctgtcactctgtgtgaaatatttttccctgttttacactcagtgtgtcctcctttgctctgcttcagtatgtgtgtcatatgtcacctggctcaccttcagtatctccccattgggaaggggatggagggacagggttggtctgctgtagcccaagaagggtgtgtgtagaccagttgttggcatcagctgctgggaggaacttgctcaccatgggataccaacacctattactgaagctgatcttgctttgtctcctctctgtgtaagtaaagcgttgttccatgcagtgcttgactgtgcatcgtgttttctttggtgactatgataccaagatacaatgaacagaagttctaagacttctactcctgatattaggtgacagataccacttgcttgacaatatgtgtttattatcattcagttcaaaatgttttctaattgccattgtggtggttttttctttatctcactcattttacatatgtatttgattcatttccaatgagttgatgcatatttaattttttaaaaaaattgttataaaaacataaaaatttattatcttaaccggttttatttggtgtgtgtgttattgctatctagctcatatccactgtagtttgagatgatactctaagtgattttcatcctttgatatttgttgaggcttgctttataatgaagcccatagtcaattttggtaatgttttgtgtagtcttgaaaagaatgtatgttcttggccaggcacagcccagcactttgggagcctgaggtgggcagactgtttgattccaggaattcaagattagtctggccaaccctgtctctacaaaaaaaatgcaaaaagttagtggtgatgcatgccttagtcccagctactcgggtggctgaggtgggaggattgcttcagcctgggaggttgaggctgcagtgagctgtgattgtgtcactgcactgcagcctgggtgaacagagtgggaccctctctcaaaaaaaggtaagaaaaagaatattctgttgttgagtgtagtgttctgtgtatgtcagttaagttgaatttttaattttgttgtttagagctcttactacataatgatttttctctgctaaaaaaaaatgaggtcttggaaaaaaatagtgtcatctataagcattaaaaaaattaaaaatgaggtcctgaatggtgtgctcaaatttccaacatttattatgggatttgtttaattctgtaagtttttgctctatatcttttgaagctgtattgttggatacatgcacatttagaatttttatatcttcttggtggatcaatcccttagtcattataaaatgtccctccttatctttagtaatatttcattaaggtctattttatttgatatgagatagctacctcagcttccttctctatgtcttttgtaagcagcatatagagttgtcctttcatatccatgacttctgcatccatggattcaagcaactgcagattgaaaatattaagagaaaaaaaagatggttgtttctgtactgaacatgtgcagatattttttcttgtcattattccttaatacagtataacaactatttacataacatctacattgtattaggtattagaagtaatctagtgatgatttaaagtatatggcagaatataaataggttatgtgcaaatactacatcattctatacaacaggctttcagaacgtgtaaaataatatgaacaaaaaaatttaaatcaaaatataacaggcttgagcatttgtagattttggcattgttgcgggggtgggatcctgcaccgaatccccctcggataccaaggggatacagtgggaccatttgcagatcctctagagtgctctctcctgtctgtctccctgtctttccgctttaatactctgtcctgcatactctagctgttttgatatcctccgatgctcagtttatctcaattaatgaagtccacacaagctccatctggattctctttccctttgctgggacctgagaattctctcaagacattaagccggggcagtcatagagttcacgttgtttgtttcccatctctcagggatcactgttctctctaaagtccattgtcttaaaaattgtcatttcatatgttttgtctggtttttatttgtgggagaggggttgtttcaagtaaaagggtaaaatcctgtccccattactttgccttggccaagagtgaaagtggcccattagatgatttttatcagtgattttcaaccttttctacagggttagaattctttgttcaagtaaaatcttatccccaagtgtcatgtgtatgtgaaataaatgagggcaagatggtggtagtgtagtatatgtgcacatgtgcctttgtatgtgttggggatatagcagagcttttttgctgacttggattcctattcccattccttgagggctttatagcccaatttgaaagtcactaatatagagagtacaaataggtatataaaaaagtaagcaaatgagaaaataagccagttattagttacagaggaaacaaactatccaggaaaggaaatttacagtatatctcattttggggtttggaaggatgtgtacaaaatagtgtaattgaaaattgataaaataaaaaatcttatatacttatattgggtaaaggaagataggagaagtgacagagcgagagagagagagtgtttatgtgtgaaggaaataagaaagctcagtcttataagaagtctcagataatgtgtagactttacagaaaagcagtttaagaatggtatttaaaaataaggaattaaataacatgagagttgaaaggtagtttagggggaggtctattgttgattgataaaaataaaaattacaaaaaaaaagcatatggtaggtttggaagtggaaataattgaatacaaaattctcttgcaagaaatttggcagagaagggaaggagaaagaagttggcctctagaagtgggtgggatacatggccacataatctgtttttccatctcaaaacacttggaccttttaacttttttccccctttttaacctgtctttaaggtggggttttttttttttttgagacggagtctcactttgtctcccaggctggagtgcagtggagcgatcttggctcaccgcaacctttgcctccagggtttaaatgattctcctgcctcagcctccctagtagctggaattacaggcatgaaacaccacacccagctaatttttgtatttttagtagagacagtgtttcaccatattgaccaggctggtctcgaactcctgacctcaagtgatccacctgcttcggcctcccaaagtgctgggatcacaggcatgagccatcacgcttggcctgtctttaagttttatcatttatttgttttggaatctgctagcaagtgaatcttacatacttgtgctatattatattatataattctctaatagaggctctaggatttctcattgatgcttttatgttttgtaattctctaatagaagctctagagttcctcacttatgctttgattagttgtatcatgcaagttaaaaattataattttgtaacatacccaaattgagagaataaaatattcatatattatccagaatccgtatttgcttcattttttaacccctttaaagtattttaaagcaaatctcagtcagaccttgtctttgtctttgtgtatttcagtataaatttgtaaacataaaaagttattttttttgcgtgatcacagcaccattagaacactgagcaaaattagcagtaatgtctaagtactgtttaatagtcagttcataataaaattttacctcaaaaagtatttttatacgtatttgtttgagttaggaaacaaactagatccatgcgtttgtatgtttcataagcctctttaaactagactgtatgctattgactatttattggtggggcgtttgtgtagaaagacctacattctggatttgtatattttttgttgttcttctttgtggtgttttttaatttttaattaattaatttatttttttagagaagtggggttttaccacgttggccagggttgtcttgaactcctgaccccaagtgatcctcctggctcccaaagggttgggattataggcatgagccaccatggccagccatgtggtgtttctttaacccctatattttcttaagaataggaagatctggccgggcgctgtggctcacacatgtaatcctagcactttgggaggccgaggcgggtggatcacctgagatcaggagctctagaccagcctggccaacatggcgaaaccccatctctactaaaaatacaaaaattagccagacatagtggcaggcacctgtaatcccagctacttgggaggctgaggcaggagagtcacttgaacctggggggcggaggttgcagtgagccgagatcgtgccacttcactccaacctgggcaaaagactgagactctcaaaaaaaaaaagaggaagatctagaaccttgattagatttcaaatcataggtagtgcagtgtatttcatattgcatcacatcagaaggtataacatgtcaggttgtttcgtgaaatcaggaggtgacagatgactcctaccattataaaattacctatcaatctttcatctaatggttttattcattgaagattgtttcctgaatactttttctgttgtatcctccacatttgtcaacgggaattctttggtagataactttctctcattaattagatcggtttggatattatgaaatacagtttgtagaaaatgtaggataaatgcttaattctattttaattgccaattttcagagtaacagtgataacttcatcaatattaagcaattaaaaagtagacccttgggttgttggaatttgttaaagggtaagtttaaattgtatttttaaccaatatagatgttgtttttaaaaattatgtgatgaggtaaggcagagaacaaattgagaatccattattaatttccctagtatttaaaagctgttaatatttaaactaaagattagaagtgattagtagctaaatttactagcttagtagtatacattttagggattaaagtttaacaggatataattcgtcatgcaaaaccaaacgcatatagggtagtactaacttgagagagtaacgttgaatggcatttctaactaaattgaaagcctttttttttttttttttaagatgtgaaagagaatttgcccagaaatgatatttaacatttagctatttggatttaagctacttttagagacatattgaaattgttgtttttaaatattgttttaacatatattttagtcttaattattattttataatttcatcattactttgctgttttttattgaaatttaaatgtatcattggctacatttacgagcttacggtgtgccaagcactgttctaagtacttttatgtgtatcaacttactaatcttcagaacaatgcaagaagtaggttctaatgtactgattttatatatgagatagagagacacagagggttggtgacttgcctaaggttactcggtttgtatgtagcagagctgggattcaaactcaaactctggctctgtagctcatcctgtcagctactactatctgaaatacttgacaaatagtgcaggataaaccccattaaaaggagctcactaagatttatattttgtctcaactctactgaggtggaattttatatttctagtatatatttaatatagtatatatagctagagtgtgtatagtgtattttaatagtatattttagatgattcagcacattgagttacttgtggtttatgtatgaggtgggaacaatgcaaaggtaagaagtattacctgtacatctttaaactgaagtcattgttctccagccagagaccagtagaaactcacctgtagctgaagaagttgggtttattactcactgcagtaagggagaactacattgagaatggtggggatttgtctggtgatttgggggagggttcgaggtaacggtattctctggattggatggtgtcaggaaggaggtgggacaaatctatgacttatgggcatcttaatcgtacctagaacgctgaagaaatgaagcaggcccaaagtttgactggaaaagagcagcagtcactcatattagccaggataaggaggtatttggtaatttttgtcatttggacaaagttcctatttttttctaccttcagacatgattacagagtggttttgttgttttcttgacccattatgatcacagagtaaccctatctaatgttgaatgttgatgttctgtaaaacagtttatgttcagcatgacttcaaggcctagtgagtgccaggccgttgttttgctactaatttttccactagtaaaccaggttcattgctgtaaaactacaagttagtaaacatacctaagtcaaaagaaaaaaggttaaattacttatggagaaacaagaaaataaagaaacaagatttaaactacctagtatctttgtagacaaataaatatttatacataaaatattttgataaatgcgagattatattattcacatatctttttattctagcggtttctttccagttatgtagctgttgtgcaatacagaaagttagggctagtgtcattggagttgtgacactgtgtcttcttcataaatgtttaattagtgttcagtaatttgtattgagtaatcatatctgtctctagcccttaaatgcacacatctttttatgtttgtacaaataaatgtataatatagcatggtcaatttagggataataagagaatgcaatttttataagctagatgaagacattaatgttggtagctatacgagttctagtgtttaagtattaagtacctactgtttgctgtgaagattcagaaaatggagatgatgatttctggagtttgaggagcctagagtttctttcattataagcatttcagaatgttaaaaggtttctcaatctttattaccgtatttgaaatattttatctatgacatatgaagaagttacagaacagcatgtgtgaattgatagtggcattgtgataagaaataacatgtttttcaatgcagattttaataaaattatgattatgataaaaaatagtcattttaagtatatattcttcctgacagtgtctttcatacagtctttttgaaatctaggtggaaggcaacactagtatgcacatttttaaaaaatggggatattcaaaataagtccctttatactagttcatgaagttttactgcattatgtgaataaaggtaacagctaagccctatatataataaaaaccattatataaacactggttagttgtatattattaatagttttagtaaatactttcacatcttttttcatatgtcatttaatatcatatcaatctaattgagatagaaatatttaccctctttcttaagcattagttaaatgtatatacatacttttaaaacttctgttctttttttctattcttgccccattgacatgaaaaaaatgttctgaattcttgctttcgcttttctcttttcttcctttgttccacttgggagccttcaaaagttctgaattataatagaagtgaagtgttagttctagtgtcagattaatacagaggaaaatgaaaattacaatttttaatagacttttataactagtattgctaattacctgtttccttttgaaatacaccgtctgtgctcaaatctaaaaaaggatttgaagtacttgacttaaaggtcttgacaagccccaaaagtcttatttaaaaaataccatagaaatctctacttacctcttttttcttcctgtaaggttgcgtttttgtttgtagccatagtggttaaattataatagtcaaaactgttatactctgagtgtataacacaatgtttaatgcatgttttgttagataatctttaaaattaatatataaaattgagtttttagtaagttggagatttgccataatgtaaattatggtagattatatttgtatatttattaacaaatctatgaatgttgttaaggacttctataagtaatgaaccatactaggaatagggcagtgttcccattctcagagactttccaatctgttggacataggagagattccctgtatgtgtacattccctgtatgtgtacacacacacatacacacaaatgtgcaaagattgtgatacaaggcagactgtgagaaatggcaggtatcaagaaagttatatagaaatattgaagacagaatgtataattaacactttggatcaaggaaggcatgttatatgaattaagggcaacatgttaacattagtggttctctttgtttaaatatagaattaaaattatagatgttagataaaattgtattcaaagatggttcttttatgtgaagaagttggtgttttctttaattagtatttaactcatgattttcaatttatctcctgttctctaaagatagataattgctttttttcccatttttaaaaaaaatttttggcagctcttcacagatggaatcacaaataaacttattggctgttacgtgggaaacaccatggaggatgtagtcctggtgagaatttatggcaataagactgagttattagtcgatcgagatgaggaagtaaagagttttcgagtgttgcaggctcatgggtgtgcaccacaactctactgtaccttcaataatggactatgctatgaatttatacaaggagaagcactggatccaaagcatgtctgcaacccagccattttcaggtacattttcttttctgaatttttccttttgaaaaatagggcatttaagtgcattaaggaaatattttttaaaattgtctttgtttgagcaactatttggttaacttagaaactttctttagctagggtttttgtttttgttcttgttttccctaaaaagatagaagtaaatttctttatatttgcagtttatcatcgttgactctttgcaaaggaaaaactacaagatgttttggattaaccggctgcagagggtcaaggcttctgcttagttttttctagttagtgtttgagttgaagtgttatacatttcttactgccgattgcttattacttaattgttcatgttttcagagttcttgcctattaaaattttattaatttggttaacaattctttgttctttacgttgttcattatttaatttaatatattatgttttctataaagaataatgtcatatatgcttgatcatttttccaaaattgccagctttaaaaattctctttctgctcttgaaaactctagaaaatggtctggatttgaaaacagcattcataggttagaccagcagtttgcaaccattttggtctcaagacctctttatagctctttgggctctttgttttaatatttgattaatgtttatcaatatttaccatattagatattaaaacaaattttttagaatacaagaatatcaagtacatgtcctgttagctatcattgtgatgaaattatcacatatcatataacctcttgaaaggtacactgtacacttgtgaaagagtgagaatgagaaaggtaaataacgtcttgtgaaaatagtttcaactttacaaagctcctgaaaggatttcggatggcccggggctccctggatcataggttaagaattgctaagttaatacactgacaaaaatggaatgtaccagtaacacttatctattgtaaacctgtatcaaataatatattaaaatattttgtcatagaaatctgttcaaaccctagtttttagccatcacatatattttcttcttttacatgagtctagtctttagatgtattaaaagattctgattaatacatttgtgtttactgtgtgtcaattgttttgtggtctttaggcttgcatgtatttataaatcctcaatcttgttcacaatggttgacaaatacctatataacagcattaaaaattaatagatgcatagattggatccccccaaagctggttttgtatatatacaaaaacatatttcatgaagttcctagagaagggccacatgagtttccttgtaactaaagcagagagtaaaacatgattgatctatttcagtaacctcaaatagaaacagtaaaataattatagtttttgatcaagaacagtgaaggtttgtcaaggctgactttggtatttgatacaatgttataaacatgttttcagtaaaaatatccttttctatactttttggttagatctacttacttattatttctttcccaaatgccaaagcctttgtttattttttctctacttagatctttttaaaaatatattttttattgatatatcatagttgtacatatttttgtggtacatgtgatattttgatacatgtatacactgtataatgatcaagttagagtaattggtgtatctatcatctcagacatttttttttgggttgggacattacagttcttcttttctagctattttgaaatatacaataaattattgttaactataatttccttgctgtattattgaatgctagaacttattcctctgatttaactgtacgttcatacccattaaccaacttcttttcatcaccccccttcctagatttactcagaatatgtataagtgatactaatgtaggcatatacacatttcataaaaagaatatactgtgttagaaaccaaacatcaatactctgaattctttgacagctggcttgtaataagtgatacattgaattgccccacagttttgcagaggagaagcagagtggaggccgagaaagtaagcaaaagaagatgacactgaagaaccctgtatgataggatattgttagttggcattatgaatagtaacatttgctatttaatttgtttcgctgttaaatttatttcagactgtattctaattcctatggcatttcttattgttaagcaggtcttagtcactataaaacagaaaatatgaaaagaaaagctaagggagggaaaggcaagttttgattaacaaaacgtctgagttacacatgattttaaataggagtgtggttttatttttttcaaatatgtacggtgaaatacttctaaaataccaagtaagcagatcagtagaccatggtctggagccccaagaagaggttaaagatgtaaatttgggatgatgtgcttatttagccccttttaaatgaattttatattctgtggttaaaaagaatctttgatttgttaatttaatagggacttactgacaatttggggttagttgtcacattttgattaatccttatgagctttaatgtttgaatataataataaacttttaagacactattgattgttaggtcagcctaataatatgcatgcagtgatctggactgattgatcagtaaatgttgatgagcgctttagatcaaagtccacagtactttcttgaattggctcattcaaccatagctgtatgcttatattatgattatgacgaaggtatctcatttgaatgtaaaaggcttatgtttatgtttggactagtctgggggaggaagaagaatctaaactgtccttgctgtcttagtaatttacagtttgtgacacagtaaccttgagggaaaaataacctaaatattgtacaaagaagaacagaaaaggctttcagagaaagtacaggtagttgattttgggcatacataggaaattagtatgtttcactgtgatcacatttgaactgaactttgaaggacaaggtagcctgtaggaggtgaggaatggtataggtaaagacaatgagctatagtgcctgacgggtaattccacttatggaaatttatcattctctgttttatttgagcttttttgtagcaatcagttattacggacaccttcagaaaattttttaaaattcaaaagtgtttagaaattttttcaaatttcttatcagatatttcttagaaatttgcctcttgtcaagaacctggctgaagtttaatgacaaaccatccagtaacagacataatggaagaaatgcagtttcaaatcaattgttgcaagtttatcaaagagcatactgagggtaccgtagtggaactggcaccttgtgggttgtgtgcatgtacagttggtagtgttttcttttggaaatcaaaaggacaatatataataactcaaaagaaagttatatgctgtatttctggcagcaacaattaaaagtctcttatattcagatataactaaggtacctcaacacaaaggagaattatgctactgttgaaatgtaactttttgactattgtctaatacatgcaaaatggctgatgcagggcaacaggaaaaaatcagcttaaaaaatagcttaactgtggctacaattaggcagtaatttgctcatgcaaaaactcaaaggggatatataaaaatgaaatactatgggatggtaagattaaagattatttttcgtttcaaaatatttttgttattgttagaatacatttaattttttaaaagctttcaagagaagtaacaattagtgttagtgaatatttgaggaattctctgaagccttgagggtttgaaacatttggctttaacgagtatggaattttaaagcagcgtttgacttgatgttactgtagtaaaacctcgcttactgagacaaggtaggagaaggaccaatatatgatagtgaaaatcagatatcttttaaatgatttttaattaccttcttatatatacaaaacataaattaatgattattaaataatgctaagttatctgaatgaagagattttccttttaaagattttagttttttagtgcatttttgattcacagcaaaactgaggggaaggtacagagatttcccagatcccctccttcctccacagacaacctcccccattatcaatatcagagtggtacttttgttataatacataaacctatattgatgcaccattatcacccaaagtccacagtttacattagcgtacactcttggtgatgtacattctgtgggtttgggcaaatatataatgcatgtatccactgttagtagtatcatacagaggagtttcactgctctaaaaaaatcctctgtgctctgcctattcatccctcttttccccttaaccagtggcaaccactgatctttttactgcttccacagttttgcctttttcagaatgtcatatatttggagtcatttaattaagtagcctcattagattggcttctttgacttagtaatatgcatttgtttcttccatgtctttttatggcttattggcagatttctttttagggttctgaataatgtttcattggatatgcaccaaatctattttgttcattcaactactgaaggacattttggttgcttccaagttttagcaattatgaattaagctgctataagaatccctgtgcaaattttaatgtagacatacaaatttttaactcctttgggtaaatgctgacgagcatgattgctggattgtatggtaagagtatatttagttttgtaataaaccgccgaactgtttcccagaatggctgtgctattttacatttccactagcaatgaatgagagttgctgttgctccacatcctcaccagcattgggtgttataagtgttttggattttggccattctaatagatatatagtggtatcttactgtttttgtttgcatttccctgatatgtgatatggaatatcttttcatatgcttatttactcatctgtgtatctttgatgaaatgtctgataaggtatttggtccatttttaaattgggttgtttgtgttcttattgctgaattttaagagctatttgtgtattttggataataatccattattggatatgggttttgcaaatattttcttccaatctgtgctttatctttttattctcttgacagtgtcttttgcagagtagaaagttttaattttaatgaagtccagcttatctgttcttcctttcatggatcatgcctttggtgtcatttttaaaaagtcattgccaaatccagggtcatctacattttctcctatgttatcttctcatggaattttagttttggattttacatttaggtctgtaatccattttgacagaattttaatgaagagtgtaaggtctatgtctagattcatgtttttgcacgtgaaggtccagttgttcagcacaatttattgaaaagtctatcttttctccattatatttcctatgctccttttcaaaaatcagttgactgtatttatatgggtctgtttctgggttctctattctgtttcttcatctgtttgtctaatcttttgcagatatcacactaccttaattgctatagctttatggtaagtcttgaaatcaggtagtgttagtcctccaacttgttcttgtctttcaatattgtgttggctattctgggccttttgcttctccttataaactttagtttttacattttaaaatggactttttaagaatttatttttaattgacaaataataattgtgtatatttgggatacagtatacatgtaaactttagaatcagtttttcaatatcacaaaataacttgctgggattttgataggaattgcactgaatctgtatatcaaattgggaagaactgacatcttggcagtattgagtctttttatccgtgaacatggaatatctcttatttagttatttggtttcttttatcagagttttatagtcttcctcatataaatcttgtacatagtttgttagatttatacctaagtattgtatttttgggggtgttactgtaaaaggagtgcattttattttcaattttcacatattcattactggtatgtaggaaagcaattgactttcatatttttttaatcctgcaagcttgctataattgctcattccgcgaggtttttttggtccattcttttggattttctccatagaaaatcatgttatctatgaacaaagacagttttttttttttcttacctcttattttttttcttgtcttaatgtgttagctaggactttcagtacagtgttaaaaaggattggtgaaaagtgatgttctttctttattcctgatcttagtgggaaatcttcaaattacgtgtcattaagtaggatgttagctgtagttttttttgtagatattctttatcagattgaagatactctctctttattcctagtttgctgagtttttatgataatgagtgctagattttgcaaaatgctttttctgcacatgtcgataggttcatgtgatttttcttttttagtctgttaatgtattggattacattaatgaattttcaaatattgaaccagccttgtatacctgagataatcccacttggtcacagtgtataatttctttttatatattgttggatttgatttgcttgtgttttgtgtcagcaaatatattatataaaaaataaacatttaaaaataatcttttaaataaataggaaatataaaaatgtagcattttctgttgtatataatatttgctagcagaaaacaattgaggtatacttgattaaagtgtttttaagaattctttttcaatgagcattttatttagttaataaaaatttgatttgtttatagttgttctgaaaaaatttgattatggtaaatgctacataaaatttaccattgaagcagcatttttatctggggtaatacctgaggttggttgttccacaactacagaaaactaggatacagacaaccagagtgaggttaagagtggaagtttaataggcaaaagaaagagaagagctctctgtgcagagaggggtcccagagaaaatgggttgccagttctgtggtgtaatgtacagggttttatagattaacttgaggaggcagtgtttgatttgcagagggcacggaagattggtcggaccaggcgtgccttttgcataaagcatgtagaagctggtggccccactttaatcttttattatgcagatggttctctacttggccagtgccatgttgcctgcctcttttactagacacatggtgacaaagaaaagggaagatgaaggctccgttgtgaacatacctgacttccaggtagcccttttctactggcacagctgctggcattcactcatgcaagcttctagcttgcttatctatgtctgcagcttgaattttcaggctgctctttgttagaagtgatttgggggctgctttctattaaaagggagtccttaccgagaactcctttaccctcactatctgcctaaatcatttctttctggctccagttgtcaccatcttaaccattttttaaaaaatacagctcaatagtgttattgcattcacatggttgtgcaactaatttcctaacatattttttttttataatgtaaaactacaattctatcccttttttttttttttttttttgagacagagtctcgccatgtcgcccagcctggtgtgcagtggtgcctcccaggttcaagtgcaatctctgcctcccaggttcaagtgattctcctgcatcagcctctcgagtagctgggactataggtgcccaccacctcgccctgccgagttttgtattttttagtagagacgggtttcaccatgttggccaggctggtctcgaactccagacctcaggtgatctgcccacctcggcctcccaaaatgctgggattacaggcgtgagccaccacgcctggccaattctatgctttttaaacaacaaatcttctttccttcctccagcccctggcaaccgtcatctactttctatccctaggaatttgactacttaggtacatcatgttagtggaatcatgtaatgtttgtctttttgtgactggcttatttcacttagcatgaacacttcaaggttcatttatgttgtatagcatgtgtcagaattttcattttctttcaaggcttaataatattcctttgtatttatatactacgttttgtttattcatccatggatgtatacttgggcaatagtcacttttggctattgtgaataatgttgctgtgaacatggatatgtaaatatgtttttgataccctgctttcagttctttcgggtgaatgcccagaagtggaattgctagatcataatggtaattctggttttaattatttgaggaaccaccatactgttttctgtaatagctgcaccattttatattcccatcaacagtgcacaagggcaccagtttctttacattcttaccaatagttattttatttttgtagtaaccattctaatggatatgaggtggtatcacattgtgcttttgatttgcgtttgcctaatgagtagtaatgttgaacatatgcttattgaccatttgtttactttttctagagaaacacctattcaagtcctttgcctattttctcatggggttgtaatttttgttgttgagttgtgggagtttgttatatgttctgaatattaactccttgttaaatatatgatttccaaatattttatctcattctgcaggtttctttttcagtctgttgattgtgtcctttggtgcgtagtttttaattttgatgcggtagagtttatttttacttttgttgcctgtgcttttggtgtcatatccaagaaatcattgccaagtatccagtgtgatgaaggtttccccctatgttttctcatgagagttttaatagttttagttcttacatttagatctttggtccatcttgagttagttttcatatatggtgtaaggaaagggtccagcttcattcttttggatgtggatatctagttttcccagtacattttgttgtcctttcctcattgttcttcttttcccgttgttgtcctttcctcatttaaggttcttggcacccttgttgaatactgtttgtataattgtgggtttgtttttgggttctctgctctattccatttatctgtatgtttttctttgtgacagcaccataatgttttgattacagtggctttgtgtaataagttttgaaatcaggaagtgaaagacttccaactttactcttctttttcaatgttattttagctactcgggtcccttgagagtccatgaattttaggatagctttttctttttctgcaaaaattgcctttgggattttggtagggattgcactgaatctgtggatcacttttggtggtattgacatattaacaatattgttttccaatccatgaacatggggtgtctttctgtttatttgtgtatttaatttttttcagcagtgttttattattttcagtttacaagtctttcacctcctcaattacggttattcctgagtatttatttcttttcgatgctatcgtaaatggaattgttttcttaatttcctttctagattgttcattgttagtgtaaaagtgcaactgatttttgcgtattgattttctgttctgcaactgctgaatttgatttttagtaaaaactgtaaattttcttaaaatcattctttacaaatttcatgctttgttcagtccttatttataaaaaattttagatgagtatggaacttgtgattaggccatagttaattttttaaatctcttcacagagcctagtttttaagtatataggtggctgccatggttacaattgaagtgtacttatttccatgagaagatttgtgttgtaaatcaacttccttcctttctgctatgatctgaatatttgtgttccctcaaaaaccttttgttgagacctgattccaatgaaatagtattaagaggtgtgtccctttggcaatattagtcatggggtagagctctcatgaatggcattaatgcccttataaaagaggcccaaagaaatttacttgccccttctaccatgtgaaaatgcagcaagaaggtgccatctgtaaggaacataactatgagaaagaaatttatgtcatttataagctaccttgtttatggcatttttgttaaagcagcctgaaaggactaagacactttacatgttaattttgttatataaaagataaaaaagaccagtaattctgagacctgtagatactggcttgaattctggagtgtgagaagaagatgatgtggctttattatcaaagaataggcagtattttaaatggatgctcatttggtttttgtataagaaaacattacttttgttacaattattagtacatgagattattaaaaatccaaaatagattttaatccacctgacaataaacctaatagtggaagacttctctggtcttatggtgaatttctaaatgtattccaggtctgttgctaagataactgactctaatttagaatatacctgttaagtacctcctctaagttctgaccacaagaacagatcaaagaataagacagtctttgtcccttgaaggatatcttagtggttgtatttatcaattgtattaataaagcaatctttattattattattgctattctattttgaattgtataggaagatgctaacattttaattaacaatatatcatcttatgtggcagatgttttaaaattatataaaagtaattctcattttagctgtaattttagaaatttgttcaaaggaataattgtatttgatacatttttaataaaaatcactatacttggaaaaattttacctctgtcactccatgacttgtgtgcattcaatctttctattgtaacttgtaggaagtttttgtttttgaaacgtagtttcactcttgttacccacgttggagtacaattggtgagatctcagctcactgaacctcccccttgggttcaagcgattctcctgcctcagcctctctagtagctgggattacaggtgcctgccaccacatccggctaattttttctatttttagtagagacggggtttcaccatgttggccaggttggtctcgaactccttacctcaggtgattcatccaccttggcctcccaaagtgttgggattacaggcgtgagccactgcgcccggccaacttgtaggaagttagtgtgaaatggcaagttagtctataggatatttggggtttgtttgttttttttttttttttttttttttcgagacggagtctcgctcttgttgcccaggctggagtgcagtggcatgatatcagctcactgcaacctccgccgcctgggttcaagcaattcttctgcctcagcctcctgagcagctgggattacaggcacgtatcaccacaccaggctactttttgtacttttagtagagacagggttttgccatgttggccaggctggtcttgaactcctgacctcaggtgatctacctgcctcggccttccaaagtgctgggattacaggcatgagccaccatgcccagcctataggatatttgtatatgaatctgtatgtgaagttcatattgtcattattgaattttaaagtttaaatagatcaaattttttgtagatgttaattttttttcctggtgtttggggacatatgacattagatctgaaagataacttcaaaactatataacaggccaaatattttgattccttgtaaggaacccaaaaaccagatgaattatttgtttaagttcataatgcaaatacagtggcaaagtcacaatgaaaacccaactaattttgtgcagcgttataggggtgttctatagtgatacaacttggcctttgcatcacattatcagttcaaatcctagcttagctcgttagctaccttcttgctagaaaaggcaagactttcaaaattagttaatactttctcttctagcagctattgatgttcaacaaatttcattaacctgtaaatgccccttggagttgtggccatactgttttattcattttttaagtatttacagtagaattgtcatttcagttactataagctgagtaactggacagcttctaagattacatttttttaatacacagaaaattcaggtaatttaaaaactgctttagattcatcttgaaatatatatttgctctggaatgaccatattgcagcatgattctcatgaacttcaaaatactttatttaaaaaacaacttgaggcagcaaaagtattatagttgtctgactttatccgtgtgatgtgcagggcctccttgtcttctgatctcagtaaacttacactgattgtttcagatcagaagagcagaaacggcttagttctaaagagactgtttggaaaacatttccaaataactgcagcacttggatgactacttccctgagttttgcttattcactgaaagcagaactactgtgccgagccctccagtgacatgggccttctgctctcccagacatttgcctctcttcacacctgttctgaatccagcatggagcagacgagaagtcatggagttctgacagttccagcacgtgtgtcccctttgcaaaggggaaaattacgttttgtaagagaccccaaatcagggtctcttataaaccctggggtaaaactattagaaatgatattatttttcatttatttaaaaaaaccacagcaaataaaatctgttagagttaaatatctgtgacgccctcctaaatcatctgtttcatttcagtaaatatttctaagatataatattctgttgacatagattgccccttgtgtttcatgtaacacagattgtatctttcttcaagctttttgtttcctcctcttctctgaagttttaaaaccagttttaactggcttacagtgtgtgtgtgtctgtgtgtgcatgcgtgtacatgcatgcatttgcactttcctttgttttgattttatcaccacctggcctttccatcaagttgcctggtgcttaagtaccacagttcatttgggcttagctttctgcctatatatgagactaacataaaaatagatttgttttctgtattcttgtggacatgagtgtatggtcttagggaaggtcattcaaaatgatttagtttataaaaataaatgtttatttactcatttgtttgagaggtatgaaccaaagtacacatatataaaaaggttatggattttaatattttaatgtattagattaaagatgaggctaatactgttgcttgaggatgataatttgacaatttacagtggcataaaggagaaagaatttattggtacttgtaattgagaatactgagttcaaacatggggtaaatccagggactgtaacaatgtcattaggaatatcactttattctgtttattcttttacctttttttttttctcacaaactttccttaggactatccataatgataatcagtaggtttctctaaccggtttaaccaccccagggggaaaattttcctaattttctaatagcttcaaacaaagttgatagcttcaataaaattaggattaagtctctggcttagcttgggtaatatgtgctgaaccagtcactgtggcctgaatgatagaatgctctgagcaagtcagggtcatatgttcacttactactgaagtgagtgatgcagttaggattgagatcagctctgtagtaatgacatgaactaaaagtaagagtgatagaagtttctccaaaagaaaataaggactctttagttactaggaatgagataaaaacaagaatattcacaatagtatagaaacataataataaaaatgtgttatttaatgattgatacaatactagattctctgtgggccttacttaagtggctttcaaatgtttttgcatattaaaatcacttgggaaggttttaaatatctcagtgtcctggctgcacaccaggccagttaaatcagaatttcgttagtacctaagcctgtgtaatttgttttgaagttccttaggaaaatcatgctaacaagaactaggtagacagatctggtagagtcaaggttcaaaaagagggatttcaggggacagagaagttcacatgggagaagcaggatccaatggagagaacagaggggcctcaaagagagagagaaagaaggacctccagcctaggaggtacctatcaaaagaagcgtgggactccaatctagtttcagagagtacactcaaaatcttaagtatcagaattcttgccagcttcagtgtatgttcagtggttcaggaatctgactcaccagtggatccccattaatcagtcagacgtgaattcaaaggtgcaaacatagggtcctgggtccagtgatgaatctgattctgagtcacagcaccataactgttaaagaaaaaattactcagtgatacttgttaaagcatgataaggctgactttcttcagaatcattgagatataggtataggggccacagctgtgggattttggaattggagaagagagactgggcccaactccaaatacagcatgggcaagtgggaatgtatacccaaggagcagggtcggggttggcggatggaaaattaagagtaacatcaaagtaaggggtttctgggtaaaacaacctaatgattcttgctgaagatggccagagtaatcagagtaattaatttggggaatggtgaaggataaggaacctgatcagatatcaagggtggggatactcttgctaaactgactcagtagggttcttgctaaaactggtttttacaagagagagcacaggtaggtctacaagaagattcgggagactgactaaagtttcatcaagaatctttgtcaggagacatgacctttatgatacttaagtttttctttttatgcggttttgttttaaacaggctaatagctcgtcagcttgctaaaatccatgctattcatgcacacaatggctggatccccaaatctaatctttggctaaagatgggaaagtatttctctctcattcccacaggatttgcagatgaagacattaataaaaggtaaaattatttttacatttgaaattatgttttacattgctttgctctatgatagggtttcaaaggtaattgtaaagtttcattgtataaaatctggttttctttctttgcattgaagtaaagtaagcattgattctttggctgtcagatagcactacagaaataactgcctctccatccccctcagtgtcccctcccaaaaaatatgccctacaacagcaaggggcagaggtggaagtaggggaacaccacttaaaaataaagagttaggtggtaatggtgaagcaagatttttcttgactttttaagatactgcagggttgagaggcaagtctagtattatatagaataagagcacaagagcctggagccaaactgagattaaatcttagtcctgctagttaacatttctgttgtgtaactcattcaactagggaacttaacctaactgtttccttatctataaaatggaaattacagtagtagtatattaaccatatagagtttttgtgaggattgagatagtatatgtaaagttctttaaaacagtgcctggtcatcacttaagtgttgaggtagctgctgttttaaaaattactattgttattcaaagaaggttatttgagttatattttttccctaggctctccaaggtatactttaaatccttgaggttaatgattctttggaaaagctggaggtgtgctgtggtaaataataggaagaaaacccttgccccaatagaaaataatacaactagaacataaaacacaattaaaatattaaatacattttgtatttcttttattccattttgtttgttcatgatttaagttttataatccttcgaatcccacaattttcattcgacactacctttaaaaaaaaaaaaaaaaaaaaacaccgcagttttgaccagtcataccattttgaaaagagcattatgaggattacttgtggaagttgtatgtagagaagaatacagtagtggagaaaatataggtagaaaccacctgaacaggcaaattaagtaatgtaaaaagaatctgtattatactgttaatggagaagcagggagtaatttgagagactttggagaaagaatcaagaggtcatgacttaaagtattaagggaaggagtgaaggagtatagccgttttgtaagcctgattggtgctattgaggaattagtggtagtagcccaattttgtttccttgattttttaatcaaattaatacaagtatagataataatcagtatagatgaggataggacaaaaagtcgcgatttctagtccagcttaccatgttgcctcccacccttcacagtctcactactctgtggcaatttctataatagttctgtttttaacataactggattatataaggataactttattttttatcaactgtagacagtaatcttttgacttttctgagaatttagatttatattgcattcaccctttcaaccttgaaatatgtatttttaatttttaaaataatttttgtaactttaaataatatacttaaacctctatttattaaatgctttgtgtcttagttttgtcatctataaaattgacataaatgtaaattacttagaatagtacttagtaattgttaactattacctatatatattacttagaaacccaagtttttagtgagttttttaacttttgtcctacattttaattgctgctcagtttcttctattcatgtctaaacttactatataggttttctttattctaacttttgaaatagaataattggtctgttgtttgaattcagcagtatgtgcgattaaattgaagggatttattcaaaatagattttaatccttaatcaaacttgaaaaaaatgtcacacaagatataactcttcttttaaaactaaaaggttcctaagtgatatcccaagctctcagattctccaggaagagatgacttggatgaaggagattctttccaacctgggctcacctgttgtgctttgccataatgacctattgtgtaagaatataatctacaatgagaaacaaggtaggtatttgaccttagcagtaagtaaaattgatttcttttatgttcttaatggtcattttatctctatatcaacaaaataaattcaaatgcaaggagtaagagcgtgcatgaaacctttaaagattttcttttagtttatcaagttatggtaactgtgaaatttaggatatatattctttttatatttgtataaaatatgttttttagaattggttagaaacagtttgtgatttccatgggatttttaggtataaaatgatgaaatgatttgtttataaatttaattgcaaaacttatttggttattcatgagttgaacatgtacctgcttgtaatgggggatgtggaaaatcaacatattgacattaaactgctttataaatagaaaaattttctcacagtgttgggaaggacaacagtattaaaaacaaatgtgtctccaggtttctcattatctagttattgttgatttgttagatattttgatactaaggagagagctacagatggaggagatattatttgtagttgctcaaatttatatctactaaagtaatcaagaaaccttggtagataatttcaacattttttgaggtagactgatactttttggtgaaatgtttttgtgtttatatttgtacactgtattcaatttctgttttcatatttaagaaccactcggttgtattatattactgggtgaagtggtttgaggtttggttgctaaatgatagatgcccttcaatgctaaattgaaatttaaaaataaaattttggttgaaggagtcttactaacttaaaaaatgtttttgaaactgttttcattttataggaaactagttccccgcaccccccccccctttttttttccttttttgagatggagtttcactcttgtcacccaggctggagtgcaatggcataatctcagctcactgtaacttccgcctcccaagttcaagtgattctcctgcctcagcctcctgaatagttgggattacaggtgcacatcaccatgcccggctaatttttgtatttttttttttttttttttttttttagaagagatagagtttcaccatgttggccaggctggtctcgaactcctgaccccaggtgatccgcccacctcggcctcccaaagcgctgggattacaggtgtgagccactgagcctggcctttcctttttttttttttttttaagtgactggatctcagtatgtcacccaggcctggaatgcagtggtgtaatcatggctcactgcagccttcaactcttgggctcaagcagtcctcctgccccagtcccctgagtagctgggactacaggtacatgccatcatacctgactaatttcaaaatttgtttttgtggagatggaatcttgctctgttgcccaggctggttttgaatttgtggcctcaagtgatcctcctgccttggcctcctaaagtgctgggattactggcgtgagccactgtgcctggcctggaaaccagtttttgaagatagttattacagttggaagagctgattttgaatcaaaattgtgctgttgtaaatatagtaaagcctaagaattcacattagcatggtcataattatattaaattactgtttatgacccttcttagagtgtaaagcgggactattcaaatacaaaggttgatagatatagctgactttcactttaagaaaaccaaaggtacactgtcaagagtggtaggcttaagcacatattgccaaaaatatatttgagaattttttgtttgatatttcaatgttgattagagattctatttttcaaaaacatactgagctaacatttttgttttgaatcatcttgaaatgcttgtgtggaatcatttttaaaatttcgagcataccctaaaacattaagtacttgacagtgtcctttaatgtcttattgtctgttatatataattatcatagtacgtatgcactacattatatactggtaaccaaatctcaatgccatttgtgagactagagcattagttacgcattaaagcagtgtatgagcttgtaaattcagtgcaggacctaataacacattttatataatggaatttcaagtgagggacttcatcttacatttgaagtggacactcagctttatttttaactgcaagttgatcaaagagaatctgttatttcctttagaatataattttaaactttcatatttttatttttgtaagtttcttttgcatattcatttcacagaacaaaacttgtttataaaaccaaaaaataagggaccaaaaaaatcagattactttgtcttgggtgttaaaaaatacattttcacttttttatttaagtggtcacttatctctaaactattgatcagttatgtgaaaagttcccatgttttcacataaaatctttattcagtttggctttaagaatgcaaggttgtcatttgtttttgtgccaagttacttgaattatacttttgtgtctaattttcctttcacagaaaaattttacagctgtacagatgaactattttgatacattttttagaatttgccttttttattgaagtctagtttgtatcatttgttttttctttgtctttgtggttatgtatgtgtcttagttacagaaatgttctgttttttttttctctctccttacgtggttttataatgttcattaggaaggctggttttgatcccatagtatccgtttaaaagagtaatttctatgtgattacttcaaacataagcattaagaaatatggttagaatgttcaaataaaaatctaaaactaaagtatgacaagaagcttacttaacctagtctttagtgttacgtttcaaattgggagctaatggttttaaggtaatttaactatatgacatgtttgagtgtttactataagtagaagatgccatgccttatacttaaaaagtatgaattatattatttaataaatttaatagtcaaaaatagtcaatattgagtaaatgtaatatgcaaactagttatatgtttgcatttaatatgcaaataatataatatgcatataatataactagtaggtatgtttgcatattaaatgcaagcatctaactagtagatataggacttaattaacagatatgacatgacgattcagttcactaaaagtggaacttttagtttctatcttaactataacttgagagattaatttagattaatttagaattaaaatgtgtatgtatatgggtatatgtataagtaacatatttatacacaaggcacacatactatgagcaccctgcaatttgtaggcatttttacatgtgaatgttattggaactggtagacatcacaggaagaaattttatatatttgagattgtagcatagcattaacacttatggcagcaattttgaaaaggttaattaaagatacagactgcagttatttaccttctttagttgccttattatagcatataaatgccatgttgagtcttttgagattaagataatttccatatagaataaatgattaagctgcatattcacaaacatgtttgattttttattacttcttaagtcattcatatgacttgagctccaggtttcattattgtgtacccaactttgagataccaatagataaaacgtaataagatgaaagccaggggactggccttggaatcatcaagctcagtatttgtctgcagtatgtttcagacccttaatttctcagaagtacaaattttaggcaaacttcttaaatttatactggattatcttgatgtctctacatatatgtttaaaccatagtaacttagattttgtactagaaaatctctaactcttaaaagcagatatatttatagcttagttactatcaagagaagtcagaaagagtatagattttggaactaaacacattcgagtttagatccctacccagttacttacagaaataagtagtattagacatatcgttttatctctttatgtctttatgtaaacacagactgttcttgacagtttacatcagaatcacctatggtacttgggaaaaaatttggatttcttggccccacccatgaccaattacaaaataatttttatagataggcttagaaattttatgtttaacagattctgaggcagtttttgtactattgatagtctagaactttagtttgctttatttgtaacttagagacaatatctacttcagatggatgctgacaagattttagatcatgcatataaaatatatagcactggaccaaggacttagcagctcttagttgtagctattatactaacataggggttggcaaacattttctgtaaggggctatgtagtacaacttttaggcattgtgggctggatagtctccattgcaacatttcagctgtgtgttgaggcatgaacacagccatagacaatacatgagtgagctgtgttcaaataaaactttatttccaaaaataggtggtggattggatttgagctgaaggtacatggtttgccaaccctgtattatgtttatagcatttgttttacaaaatatacctgattctgaaaaaatgaaaaatggttactataggctagatagtaggtagttaagtcctataactactagtaggtagttataggacttaattaacagatagatatgatgtgacaattcagtttaagtgcaactttcagtttctatcttaactataacttgagagattaatttagaattacaaatgtgtgtatatatatatatgagcatatgtatacataacatatttacacacaaggcacacatactatgagcaccctgcagtttgtaggcatttttacatgcgaatgttattggaacagataggcatcacgggaagaaattttgcctctacctgctctcaccatgtcagttgacaggactcaggacatgggagaagagtgagcttcctttctgaagttgatggtagctgtcaagatttttgaaaagttagtgccaggaattaggtgattggtaagcagcggcccattccttgccttcagtgaaatgacatcctgaaaaggtaagaaaagaatacttaatgatatggtgatagaatttgatatataataaggaaaccaaaagcagcagttcttgctccagaactataggaattatcagtcatcttttaaatcaatcattaatttaatagactttatattaagcagaataaattgtaatattgcctatgactaacttcaaatctaatattttaatttcaactaatcatttaactactgacatcaagaaattactaaagctgttgagatttctatctcatgtcttgatgttctctcagaatgtttattggtctcatgacttttggtgactttcatttctcctgctgtccccatttcttcataaaagctcatgtaaatacctaatatttaactttaaatttcagtaatggcaatcactgtttattttctctgtcagcacaatacaagaagctgatttacagctgtttaaggaaatacaaatgagtggaagaaaaggaaagctttttctgggaattaaagagtaaatcaggttttgttttattttgctttgttttaagagttctatacaatataaatagaaaatgggtgagtccccatagtcacttgtttggctctaaatcttatccattctattattactcctgagaaagctttgtagttgtcatgttactcatgttttaatgactgagaagagttttttcattggtacttttaaaaaatttaaataaatacaaattgatttttgtgtttggtaaactatgttttctagggtggtgtttttaaatgtagtttaatttttaactctgttttaatttgtattctcaaccactagttagcagaaaataaaatatctgtaagtcagataataaaaaacttaaatgaactgtaaaaacctgaagttatgaagaaagagtgacctaatataggtactagtttgtttgttttttcattcattcattctggcccactgtgttcagtcttgtacttgaataaaaatgtcagaaacaccacacttttttctttagtttttcatgcttttttgtcttttcccctcccccagcaaacgtgttattgtgtgtcagcattttctgcaaacttcattttttctactagcatttaaatatttcctgtgtcctagggattgctctgtggattgcaggataaaagagggaagggaccctagtgcccctccaggaggctgtgtatcttgtagtggaggagtccaatcactgaacagatacttacatttagaatgatgagtgctctggtgaaggggtacagagtactacaggacaccagcgtgaagattaaagggaaagtgtttcagactagaatactccctgtctttttctgtataaaatagaaaacattttgctaacattagtaggattatagttacttttcgtatcgttctcttcgaacctgcctaacattgcagagcaagtagggtgagttggaaagatttttcaggttctcatattgactattttgcttttcatttttattcctttctcctaacaacaaaataaaggaattcagacaaacatgtcatgtgataattatatagccttgggtaatacattattattttttagttttaaagtactttaaaaattggcagagtatttttagtatactaagatttgaacagtttaaccagtagtgtcgggatttgattacgctgataaagatatgcaagaaataaagtaataaaagacaaaatgtaggtttggaaaattcaaattgtagttttatccattaatcatatactttactttgtgcttgtcattgtgataattacataaagataaataaaataacacacctagcccttaaagtagtagttctttactttttaaaggtcaggggtcccttgagaatctgaaaaattgagaatctcttcctaagaaagtgcacatacacataaaattttagggaatattctagttgtcttttcatccttgaaaccccaattaaaaattcatgtcttaaagaactgagatgatgatcatgctatatgagctagttaattattaatgctgatgtggatattcgtttaaataaagcgaaattttagaaatcagaagttaaatttatagaaggaaaaagtatattttctgttgttaggaaagcattttccagtaatttgatttttctggcaccctaactaagggaagttggctttttaaattttactttgttgcagaagattaaatttaaggttgagttccactttgtttgcaatagtttgaaaaagaatagttaatgcagattttttttttaaatttttttccttttaagctttgtgtcttgtacaatgtgagtttgccaaattttcttcatctgctacagattaggtatgccattgttgctgccatgtggcggcgcaccccgtgcttcttaaacgcactgactggaggtttatcgcatcacttgttcacatgcacggagcctggtaacagcctcatctgtatcttgttagcttcattttcttatttttaaaatttcattatttataaactcaacatagcatttaaaaataaaggctagttttaattaattaatgttactacaaaaagtcattgctaaaattttcatagtgaaacagattttaacttttgttaaaatgtgctatgctttaattaaattgtatttactctacaagcagggatgttttacctgccattttaactgtatttgccaaattctaaatataattttgaaaattgaaattgaagcttatgtttatgtggcaaaagtaagcttcaggactgggctgtgtatttttattggcatgtaacagttaatatgagctctacaagaatttgtttttaaggagctaaagctatcaacagctgcagatttaaaaaattatatattaaaactgttaggttagctcagttgtacaacttagtgaatcttgtatcctgagtttctgaaggctggtggataggtatctctgaaatcattgtgttttagtctttttactgatagttttgtatagggaattcatcttctcttttaaaataacttttttcctttaatttatttctattacttattgtacataaattttaaaataaaaaaataaaagaaaaaagtcacttgtctatcacctgttaatagtttaaacattttggtttatttccattcatccttcccccccatgcattatttacatatttttttttctctgtaggcatattttaatttggatcacagtttactacttagtatctccttttcatgacatttgtaatttccctggtcattatttttgaaaatgagatttcttcatggttttatttcattttattttcatgcctgtgagtattttatcatgatggttgtcttcactctcctactcccaatgattcctagaaaagaaactttaaaacatgtttctacttcccattctgcagtttagtaaaatgatttggttaactcttaaaactttttgtggaataatgttctgtgaattcaagtatacaaggcaggaggatcacttcaggccaggagttccataccagcttgggcaacatagcaagaccccgtctctacaaaaaacaaaaagagaaaaaaaatatataatacttgaggtagttgaattgccgtgatttattgtcaccaatatttttaaatcttatatttattataataatacacattacatttttataactgggttataacattgattattctcacttattctagatgtgacttatttaaataagtttagaattatatattaaatacaattatattaaaaacatttttgcttttatgtaaaacactatttgccatgacattttttgtcacgtaattttgtttttctttgtgtttgaatatgatcaaatacttcccaaaattaaacttacaaatgtatatcaacatattataattcaaaagctgtttttatttgggaaataaataacaatgtgtaaagaccgggaatttgttctcctacctaagcctgatgattaaaagacagtgtaactatgcaggtgttaaacattttctatattcttacagccatctctgttcatatatccatttttaactccacgcccctgtaagcctttgagtttgtgatccctggtgaagacagtgacccacattgattttttttttttttaaggtttctctctctcttttttgctttttctctcgaatataggacctatatctttgttaaggcaaatcctttataatattcattactcaaaagttaaaagttcctgagtagtagtatgaaagaactagattatctttggagagttataatgacatgcctatatatgtagcagtaatttagaataggcatctatttagcttatgtgaaaatttctcacgtttataaacgttaaaagaaaccatacttttgctttttgtaagataaaaccaccaccttattgcaccgtaatgctgctcagatatggaaaccttggttaggtagtattacaggaaaatgtaagcatatgatagcaactaacttcttgttagtgatcttacattgctcagcaagtatagcattattgcaagatttacagaattcaggtctttaaaagtttatattttatttccatatgtagataagcttgtcagtttactgttggagtatcataaagtttttgttaaaattacacagattattagtaatttccaaagataaaaattatgtttctaattaaacttgaatttttaagtaactgatgcccccatgtggcaaaggatttattttgcttttgcttaaacttggagaatgactgtcttttcatttttctttaaaaaagtggacattagtgtttataaagaagctgttgaccaagagacataatttgaattttgtaaagctcattgccataaaattcacagccccttaccctgtattgtctcacaagtgcatgtaatcaagcacgtacaatgagacaaaatattggaagctatttaattacaaatagcatagggattttctgatcttatatgtgatttcttaatgtctttgtttttgtgtctcacataggtgatgtacagttcattgattatgaatattctggatacaactacctggcatatgatattggaaatcatttcaatgaatttgcaggtataactaatggagtaacttatttagctttgaaacgatattttcagaatatttcattctttttttaaagtagataaaccgtgagcagggggaacattttcccacgtgttgttgaccgtttttctttgcttttgtttatcactggaagaaagcagagatgaccaaaatttcttccttaattgctatcagaaagtaataggtggccgggcgcggtggctcacgcctgtaatcccagcactttgggaggccgaggtgggcggatcacgaggtcaggagattgagaccatcctggctaacacggtgaaaccccgtttctactaaaaatacaaaaaatttagccgggcgtggtggtgggcgcctgtagtcccagctacttgggaggctgaggcaggagaatggcgtgaacccgggaggcagagtttgcagtgagccgagatcgcgctactgcactccagcctgggcgatagagcaagactccatctcattaaaaaaaaaaaaaaaaaaaaaagtaatagataggagaaaaataatgattgtggcttctgttgagatcagacatagcataaggtgcttcataaatcttacctcatttttttctccacagcagccctacaaggtaatactcgcagtttacatatcaagaaagaaactcaccaaggtcacagtaaaatacagagaactaagatttgaagctaatttttaagcatttaaaaagcctttgctgtttccattgtaaactggggcttttggaatattagttcactaaaaagttcaataaccttttttgactttgtctatgaatattgaaaagttggtcatttttacccctattaatttataattacttaagttaaaattactagttttttaaatgtaagtgggaagaatttaaaatccattttatcactctttatttagaaacacgaaatgctctaaaaactaaagattagaacataccccagaatggtttatacctagtaggaattttttattgttgaatttatatttgtgtaagtttatatatttatatatttttatatacttcagattaccagactgggaaatactctgggaaaaaattttaatttgatgtttccagttattttggactaccaagcttatcatatacatataagctgtacatatttttacgtatctcatctatggaaggggaactagctgtgcatataataaaatattaacatgttagtaatatagacggccactgccgtggatatgaaatagaaaactccagtgatcttctaatgattttgtggacaaaaaaagtgagctaaaccttgtgagttaggtagaatttggatgtgcaaactaaagagaaggaaaggggaaaaaactttaagatgaactacttacttttataggatatagaattcatgaaggagactacagagttataggactagtgaggtagatttagaccaacttctaaagaaccttggatggcaagatagtatgaactttgtcttctaggttagtattttccaaactatagatcatgaagttaaatttgtggggtaatgacttttttgtttgcaaggaatggaaaagagaaacaaaatctcagagttggaaaatgttgttgggataaatactgttttgtgaaatgtagtatcagctggttctatgtataaggtctcaaaaaaaatgtattcttggttgcagtgagccgaaatcatgccactgcactccagcctgggtgactgaacgagattccgtctccaaaaaaaaaagtattcttaccatgagtcatggtttgaaaagttttatagccacactttgaggtagtgctccaaatgtcagcatgcttaagaatttcctgggttgcttcctaaaatgcatagtttgggtttgtgatgcagctggttcaagctataaactttgaggaaaaattgaagctatgagaattgatttggtgatcaacagtaatgtgccttagtgtttaagctgaaatacagaatgattggtttattattttaataaatgctttttacttaacatgcagtattccagccaaaatggaacttttcattttttatgaaaaaatggtggttttagggattattaaggtatgcagaagagtttatgttttaaaatttttgagtgtagttttttttcttctaaaggtgtgagtgatgtagactatagtctgtatccagatagagaactacagagtcagtggctgcgtgcttaccttgaagcctacaaagaatttaagggctttgggactgaagttactgaaaaggaggtagaaatactcttcattcaagtcaatcagtttgcattggtaagtttaaatgtacacaattaatgaaaggttcttactgtaattgaaaatgcttctaaattttcgtcatcttagacaatttcctattttaagttttgtgaatttttgttcaaaataatgtaaatacatgaccatttacagtatgcattaccccattgcattagttttaaggacaaaaattttgtttcatttcctgctatatccccatcccctagaacaatgcctggccatatgataggtactcagtaattatttgtttaatgagtagattcttatcagggttaagattgatgcataaaacaatttcttagtctattcctttctttacatcaaagtcaaattttacaggagaggagcttttccacaacacattttatggttagatcttatgtgataaaagtaggttggaagaacctgtaggattatgttttttatgacttatccagtgttttgtcttcttgaccttcatttgataagcagttatttccagctttattggtgtcttaaagctttattattaagacctacttctctttacatgcatttatattttaaaaatgagctcattatcttttgagaataatatgatacattagaatgatctttcaactaaggtgttagataattaaatggaataataagccaaagctattttagctgctgctttttggttttaatataattttgtatagttgacatgggaaatatttgttgtgttgtctctacagatagaccctagtggtatatgggtatgccatttttatagtcttaaaagtaccatatgcccagagttactcagaatacatcccaagtaagaaggtgtcctgaaatgttcctttacctgctgttcttctatctattttcagtacagttactggttcaattaatgacatgctctacagctggtcctaggatgcctgcttttctatttattgtatttaagcatgatcttagagaatgtagggttttctttctcattaggtgatttaatgaatttcagattcagcctaatattccatttatgcattgaattagttaatttccaggtaaagtacacatagctcatcaattcttaaccatcaatcccactgtttgctattagaaagctgatttggatttccttgcaaacttttgatgacatttaagatttttgggggatactgtgactgtatctgtacatggcattgaaaaatacctttgcttctgatttgatcaattgtttataaatattcatcaatcagatactaagtacttactgttattctaggtcagtagattggaagaataaaaaaaatgcactctttcaaaatgcttataatttagaaggccaaataagatgtacagaataactcttttggtggtaaaagttaacactcatttcttttgaaattgattttattttaatatttacttttatttttattttgagacagtctttgctttgtcatccaggcctggagtatagtgatgtgatcacagctcattgcagcctcaacctcccgggcttaagcagtcctcccacttgagccttctgagtagcaagcgccaccatgcctggctaatttttttaatttttctgtggagatgaggtctctctatattgcccaggctggtcttgaactcctgggcctaagtgattcttcccggctcagcctcccaaagtgctgggaatttataggtatgagccatcatgccagacctatttttttattagatacaaggtcttgctctgtcacgcaggctggaatgcagtggtacgatcatagctcactgcagcctcaaactcctgagcacaaggggttctcccaactcagcctcccaagtagctaggactacaggcgcatgccaccatgcctggctgattttttaaaactttttggagagacaaggtcttgctatgttgctcaggctggtcttggactcctggcctcaagcagttctccagcctcagcctcccagggtattgggactacaggcataagccctatacccagccataacacccgttttgctgtaaaattattggtaaattggaattagaaggaaacttacttactctgattcaaaatgaaaaagaatatcttcatgaaatgaacaacagatatattaataaatgtcatacattcagtagaaggtctgattaaaaaaagataaaggacaattgatagacataaaacttcagtacctttttaataacatttctgaataatttaatatgtcctctgaacttacatatactaagtttttccatagggcatatagtaagtgttatactctgagattctgataccaatttctagttcttcctcattaagaaacattaaaagcccgttatttatttcaattaaaaaaattttttattattatactttaagttctggggtacatgtgcagaacctgcaggtttgttacataggtatacatgtgccatggtggtttgctgcacccatcaacctgtcatgcacattaggtatttcttctaatgctgtcccttccctagccccctacccactgacaggccccggtgtgtgatgttcccctccctgtgtccatgtgctctcattattcaactcccacttatgagtgagaaaatgtggtgtttggttttctgtcctgtgttagtttgctgagaatgatggtttccagcttcatccatgttcctgcaaaggacatgaactcatcgtttttgatggctgtttagtattccatggtgtatatgtgccacattttctttatccaatctatcattgatgggcatttgggttggttccaggtctttgctattgtgaatagtgcctcagtaaacatacgtgtgcatgtgtctttatagtagaatgatttataatcctttgggtatatacccagtaatgggattcctgggtcaaatggtatttctggttgtggattcttgaggaattgccacactgtcttccacaatggttgaactaatttacactcccaccaagagtataaaagcgtttctgtttctccacatcctctccggcatctattgtttcctgactttttaatgatcaccattctaactggcgtgaaatggtatctatctcattgtggttttgatttgcatttctctaatgactagtgatgatgagctttttttcatatgtttgttgaccgtataaatgtcttcttttgagaagtgtctgttcatatcctttgcctacgttttgatgggttttttttttcttgtaaatttgtttaagttttttgtagattctggatattagccctttgtcacatggatggattgcaaaaattttctcccattctgtgggttgcctgttcactctgacgatagtttcttttgctgtgcagaagctctttagtttaattagatcccatttgtatactttggctttggttgccattgcttttggtgtttgtagtcatgaagtctttgcccatgcctgtgtcctgaatggtattgcctaggttttcttctagggtttttatggttttaggtcttatgtttaagtctttaatccatcttgagttaatttttgtatgaggtgtaaggaaggggtccagtttcagttttctgcatatggctagccagttttcccaacaccatttattaaagagggaattttttccccattgcttgtttttctcagatttgtcaaagatcagatggttgtagatgtgtggtgttatttctgagacctctgttctgttccattgatctatatatctgttttggtaccagtaccatgctgttttgattactgtagccttgtagtatagtttgaagtcaggtagcatgatgcctccagctttgttctttttgcttaggattgtcttggctatgcagggtcttttttggttccatatgaaatttaaagtagttttctgtaattctgtgaagaaagtcaatggaagcttgatgggaatagcattgaatctgtaagttactttgggcagtattgccattttcacaatatttattcttcgtatctatgagcatggaatgtttttccatttgtgcatgtcctcttatttccttgatcagtggttttgtagttctccttgaagaggtctttcacatcccttgtacgttgtattcctgggcatttaattctcttcgcagcaattgtgaatgggagttcactcatgatttggctctctgtttgtctgttattggtgtatgggaatgcttgtgatttttgtaaattgatttttttttcctgagactttgctgaagttgcttttcagcttaaggagattttgaaaagccctttatttatcaagtcagtttttgtttcgattcctgttcttattttatcagaatttgctgatcgtctgttgtgtgcttttcctgcccttctgggatgtcacaactttcttgcatcagggcctctgttgctatcttcttttgacatatcttcttttcttttccaagactttctatatcttctttttagctagccgtttaccttcctctcttaccaactcttaatttcctccgactgtttattaagtatgtgcctctcgcatctcaagcatttgaatgaatcaataattgtgattgcaatgtgaaataaaaggaaaccctgaatcttactcctttatccttcatgcgtttctcagacactgcaatctgccttttccctcactgctgtaaaaagaaaatcaggtaaggcttaccaatcatgacataattgccaagtccaatgtaaatttttcagtccttatcttacttgatctgtcagtagcatttgacagtatttaccattgatttaaaaaatgttctcttgttgacttttgtgatagttttatgtatggtgaaaataaggaaatgatcaaagtctggtttcatgaattacacactttattgccatacaaagatagttttttccccttaggttcacaatgcttaaagagaggaagaacaacctgaacaaatctcacagggaatatactcaatagatgaggtacattaactatataatgagtgagttccaaattgttaaaagtctagtccaattcggatgaaagcaggagaggattgagctttttacgattagtttcttgggcttgaccaacataggagagatccatgaagacacttgaagttcctggacacaagaagttggacgttaatgttgtcatgacaagacttcaaagctccaaggcctgtagaggcctgaactctgcttttggagaagtaactgacagagtgtagcctgtcacagactaagtgttcagaatgtcaaactgttatgtttatatgtattttgaagtccactagttaaggtcagttactcacatggggtctgagaaagtgtaatgtaacattcccaagaggggaaggagttcaccccaagtactcacatatggagtttgtattggcattctccagagggacagaactaatgggatatatgtataagtggaaggaagtttattagggagaattggctcacctgatcacaagttgaagtctcacagtaggccgtctgcacgctgaggaagaaagaagccagtagtggcgcagtacaagtttgaaagtctcaaaaccagaagagccgacagtgctgccttcagtctgtggccaaaggcccaagagccccctggcaaaccactggcgtttaagtccaagtgtccaaatgctgaagaacttggattctgaagtccaagggcaggaggaagcatccaacatggggaaaaagaaggaagccagaaaacccagcaagcaaagttatcctaccttcttctgcctgctttgtttttgccgtgctggcagccaattggatgataccagccgacattgagggtgggtcttcctctcccagtccacagactcaaatgtcagtctcctctggcaacaccctcacagacacacccagaaacaatactttcctagccaactaggcaaccctcgatccaatcaagttgacacctaacattaaccatcatagggtccgataagacttcgcattctcctagggagtgggagtagttgcattttacatatgcgatctgatagttctcatattcgtgttttttgttcttggttttttgttttttttttttttttgatatggagtctcactctatcgcccagccttgagtgcagtggcacaatcttggctcactgcaacctctgcctcctggattcaagcagttctctggcctcagtagctaggagtacaggcgtttgccgccacacccagctaatttttgtatttttggtaaagacggggtttcaccatatcggctaggctggtttcgaactcctgacctcaaatgatccacccacctcggcctccccgagtgttgggattacaggtgtgagccacctcacctggccatattcttgaagggtggaggaatacatacatcattttaaagctgtgtgacaaattctctttttgtactgtcttgctcagtctcttaatctggctcctctttcctcctcttctcccagccctcttacatgttaacagtattccctagtgttctgatttgggtctaccccttccaagttctgttcttggttcctaaaatgttcttgatttcagcaccttctccttttattttttacctttgattgaggactgaatctcttgccaacattagcctttactggtctctttgccttcagttttttttgttgttgttttgtttttcctgtctttcatttattctgtatattaaaaaagtgatcctttctagtaattagaatttaattaattagattgtgtcacttttctattttatggctccctgtgacctacagaatgaaatccaaatgacagcatctgcaaactcttatttcccactacttcacacgtcctacttctgctctagcagagtcattttgtgcgggcatactccatgatgttgcatgtctgtgtacttagaagcttattccttctacctggaatgccttttaccctgcatctcttggcagatttctcttattccttatggatgtgtcttaagtgctgtttcctccttagatagtttatgaagctgctttgataaaaagaaaagcaggtctgaatgataagatcagggtatacatgttttgaaatagtataaatggttagtaaatgttgattgctcaggccatgatacagacttctaaagattataacatttcacttgtcattgattgtttaatgttgagatggtggcaaacaaaagtaggtatatgggttataaaaccaaacagagtatacgtaatggctttgtggagcttttcttcccccgcccccccctccattatatgcacactggggatttattttagttatttatttaccatataaagctttgaatatttctttgcaacaggggtaagtagtctagaaattaaaataccctttaacagagagacttacatatccataacttccaaatgtgaaagagatagtatagttacagaatttattatttttttggatgtacttgtattttggggggatgcaaatgatgaatgggctgttttctgcctttgtttctcatccatttagaatctactgttatatattaatttatcacttttccccctataaaaatggttgcctacacaaatgagatttcagtgaggttttatggataatgcttctctagtgtagaatcgtttagttaatttatataagtatatgaataaaaactgattgagaaatatagttaccatctctgcttgacaatggtgagaagagctaagttggtatgtttttaaaatgcagaatgactcttgatttctcagtcttttccactacagagcaaatttagtaggaagaagagattaggataccatctataggtgattttatatcagcgtaaaatatgcaaggcaatttagactagtggttctcaaatttttcaatcttaggaccccttcatacttaaaatgtttttgaagacctctacaagcttttgtttttgtgaaataattaacagtatttaacatattagaagtcaaaattcaaacatttaagtatatatatatatttaaaataaactcattacattaacgcaaatgccataaatagaatactatttttcaaaacaaaaaacaatttagtgagaagactggcattattttacacttctgcaaatttctttaatgtctggtttaatggaatacagcaggattcccgtatctgcttctgcattacatcttttgtgatggattgtttcatttcaagtatatgaaaaaaagtttcacacatgcatgttggaaaagaggagtattttgccttttcagataattgtggatattcttttttgatactagaccaaagctcaacaagtgatagtttcttaaaggttagttgccatgaataatctgaatgtatcaattaattttttactctattacattaaaatctactggtttatcttgcagattgaatgattcttttacctgtatgtgattttgtaattttaacttattagttatttggaaaataattgattcattgagttgtatagatcttccaaatgttgacacatctcattataagatagctaaagatcacatatgttgatatcaccaccagtgtcatcagaaaaacttatagtactatattgagaagctgttaagctcacagaatcacataaaacttttctcatgttctaattttagggtgaaaacttgaattttatcattggcaacaaatattgtcagttattttcactgaaatggcaagttatcttttttatagttgagaaaatgtctgccaaatactcaagtctgataactctagtttgataactctagtttgtatattagtcatttttttcaagtaaaaattgtgtcccattaaaaatgtgcaaattcaactcaaaagtcagttacctaggtgtttttcctgagacatccattgtactttggatatgcagtagacgtgctttatatgtactgcctatttcctcccacagaatactagagcacgtactccagggtagagatttaataaaattaatagttttaatggcttcacaaaggacattctttagtgacattggctttttactgttattgtgtgatggtgaagaataagactattacactagtgtgatttgctaccactgccttgacttaaggtaacagtagtttcaccctcactgcttttgaaccattggtgcaaatgttaacatagtcaaaaaggcaagtaacatatcagtataattatgaaagtaattttgggcctccgaaaactcccatgggttcatcgaccactttaagaacctctgatgtagactttgaaaagaaggaagtcctctaatttcataatttcatttctcaatacctgatatacttttttagatagaagaccatttttgaaaatctttatcatttttaatcattctggtttcatatagtaagaatagctagcattctattgaatatttgttatatgccagctataggtactattatgacctacattttacagatgaggaaataaacgcaccacgtgaagtgcttaaagccacacgccagagcccagcttgtttttttaacttttatgcttcatgtgcaagtgactttagttgtttagtctttgctacattgtttattcttttctatctctatatcaggaaagaaattatattcctgttctttttttttttttaagagacagtgtctcactgtgttgcccaagctggagtgcagtggcatgctcctcactgcagccttgaactcctgagctctagtgatcaccagcctcctgaatagctgaatagttagtggtatttttttgaggaagccaaaaacaaagtgcagagtgctttttaaatagagatctttaggttgaaaaattttttttacatgtattatatcctttagtctttaaaacaatcctgtgtagaatacagaatggctaatattcccatctcgtaaatgatagatctgacactaaagtttgtgacttattaaaggttgcaaaggtactcagagatagagcctggactggaacctctacatcttgtaattcaaattaagaattctttttggtatactgtgctgcttggtatttttaaataccaaggtcatggctgttgaatacttttttgttagagcccctttgttactgttgctgtaatgaatttagctgaaacaaaaaccttgtctttaatactgtttctacttagaatatttctagttagaatatagtatttcttgggaagtgaaatcttgttcagattttaaaatattaccctgtttaactgaaaatagattgtaaagcacacataattattttacagttactaattacatgctaatttccctgtaagtccaaaacccatatttttcctgacataagttgtgttactttatgttgtggtctgttatgcagaattaagccagtaagatcattttcagatgtttgtcacccctagaacatttttcacatttaaatatatttattgcttgtgagatttggattttcttttgtgtttatatttgtatgtcaagaaacaaaggcctttgatataataatgtgtaagcctgttagcaattataaccattaaaaacactaacatctatcagtgctgatggtaaactttgctttataaaaaagcacatcacaggaactggcctctatttttcaagtgattataatttaccataatctcctttggtgttgacgaaagtgatctgtagccatctagtgggtgcagacgtcagtaggatctaggttttagacgctttatataaaaagaacagcaagaaagtgtggtgcatggagttgatttagaggatagaattagcaattcatatgtgttttacagagaaattcattatcataatttttgatttttctttccttcttttaaggcttctcatttcttttggggattgtgggctttgattcaagccaaatactccactattgagtttgatttccttgggtaagttaaattttattatatgattacattggtctctgcttttgtttggattaacattaagaattcacagggaatattgtagttatttgcaatcaattataaaagttgtatacacttagtaattggtctgtgaagaaattgctataagctgttaagtgctcgcaggattagaaaagtgtccagtaggtggtgcaataaactaaaaatatgtcctttgaaaatcttaaactttaagaaaaccagcttagaggactgagtgaaaataagggaaggaccaagtttttcagctttgactaatttttttgttgttctcttttctcactaggtatgcaattgttcgttttaaccagtactttaaaatgaagcctgaggttactgcattaaaagtgcctgagtaaagaagagatttaattattctccagtagctgagcaatgcttgtgaatcttttcttaagaaatcccaaaaagccaatattagttaaaattctgttgtttaatttggttatcttgctttataaattatgcctctaaacaatcaaatctatttttgaaatagactgaatgatgtcaagaaatatacctactgctatccgtatgtggtggattagaaatgtgttaaatctgcaaaaggtataaagatgtcagtttaatttctttgataatttaacctatgttgtatgtgaattatttattataaacttagcacgattctgtgactgtttttctctgtttcacgttcgttgagtgtaagcaatgaaaatgtcccaaataagttttttaagttttactttaataagattaatttcagtaaacattctagttgttcagtgtaacctttttatcttgatgcattgtaagtaaaatgaatcatttactcttgaaatgccagtcattgactgatgtagataatttaggattttcatataaaaatagctgtttaggaaggtgaaatacattcactgtctctgttggtggtacatcttgttgaattcaatattagaaagtatttctttttggggtaatataacttagaattaaatccctgtttctctatgtagtctggcagtataaatataaatatttaccatataatcttggaataagtattagttaatgttaccaaaatctgtattaaataatgttttcaaatgct

SEQ ID NO: 106 - DNA, 55358 bp, Homo sapiens
aaataccaggaaagggagttggaagtaaagtaaaaataaaaaatgggcaagagacctgagtaaacatttctgaagagaagacatgcaaatggccaatagatacgtaaaaaaagtgctcaacattgctaatcattagagaaatgcaaattaaaatcacattgagttatcatctcacacctgtcagaatggctattatcaaaaagacaaaaggtaacaagcattggtatggatgtggaaaaaagggaatccctgtacacttgtacacttggtaggaatgtaaattagtacagctcttatagaaaactgcatggaggtttgtcataaaacttaaaaaaattatcatatgatctagcaatcctacttttgggtatttacaaaagtaaatgttcattttagcactattcacaatagccaagttatagaatcaacctaagtgtccctcaacagatgaatggataaagaaaatgtggtgtgtgtacacaatggaatagtatttagccttaaaaaggaggaaattctgtcatttatgacaacatagatggaattggaaaacattatgttaagttaaataaaccaggcacaggaagacaaatagcacgtgttctcacttatatgatgtaaaacaatcgaacttgtagaagcaaagtagaatggtggttacagagactggggtaatagggaaataaaggtcaaagggtacacaatctcagttagcagaaatatattttgaattctattgtacagcgtggtgaatatagttaaattggggtatcatacatttcaaaattgccaaaagtaaatttcaaatttctttgccacaaaaaatgttaaatattttaggtgatagatatgttaactggcttgatgaaattatttcacattgtattgagaaataataacatcactttgtaccccataaatttatacaattataaattgtcaatttatagttataaaaagaaatgcaagctaaaataatactttattgtttttcttctccaggtgataagcttattcattttggtgggatttataggagagttccaaagtttttcaaggtgaggactttttgggttgtgtgtaaaaatcattaaatttaaaaaatgttttagtaattctttagtctaattttgacattgcactttgaatctgtgtatccctccaacatattttctctttccatatttttataaaagacaatgataacaaaagcatgtgtttttaattattattcttttacttaaagaagaataattctcttgtaaaattatttttaaaaattgaagactaaaagtataagttttttgtctcagtgccgtggttttatctgtaatgcagataatcacagtggacttatatatcttagagcaatatttgatctttaaatgtaatccttgcaaagcatcctctggattttaaaggttgagagttttttaagaaaatagtcttaccaagttcttgaggcctggaaaaaagccagcatcatttatccaaggctttgttatgctctcactgtgtcagattgatgagacagagccaggtcagttcattttatggaactatcagaaaatgtgtcaggggctgtgctaggtactggggataccacaaggagcaagaaggcactgggagcatgctgggtgattcgtatcttgagccagttcattgcaatatgaatgtgttaagggctctgacagaagcctgctcagggtgatgtgagagcacagcaggaaggtcaagcaaacttcctctcctaagtctccatgtttggggaagccctctccatttccccaggacagaggctagaaaaataacagtaagttcagattgttcaagggtcaaaagtatttaggtattttgatcattggtaccatacgaaaaccacaggttggcaagattggccctgtaaaagcagccaaggcacacactatagaatgagagtcattactttcagagtaacctgaccctcttaagacatgcaagaatcatcttgactcaagatattgcccagccgaggaatgtgctgggaatccagaaatcaggaatactagttcttttattcttcgtagagcatcattttaggcaagccttccttagtctcttaaagctgactcaggtagtcttttccatatgacatggccagaatgtgagcattttatgagagtcaactctccattttcacatgtactttattttagtggagctgtttaagctcagattgtcctccttggttgtgtgcttgaaaaatggcctaaatgaacaggggatgcatttaaataaattcctgtccattcagcctctgccaatttttagttttccacttctcatggggactttttatagtttcttgtctttcagttaagtgtttctggataacttttcaactcatcattcagaatcccttcaaaggccataaaaccttgctcctttcaaaggccataaaacatatttacatatgttttcacctaccctcttaactcaaactctcccttatctatattcccataacacattatattgaatgcatttctgttctgaaatccatcaaatgagatatattgtactatgattatttgtttacacatctgtgtctctgtccttccttctatcaatagtcaatgacctacctctttttttttttttttttttgagatggagtcgccctctgtcacccaggctggagtgcagtggtgcaatctcagctcactgcaacctctgcctcccaggttcaagcaattctcctgtctcagcctcccaagtagccgggattataggcatgcaccaccacgcctggctaatttttgtatttttagtagagacggggtttcaccatgatggccctgttggtctcaaactcctgatctcaagtgatctgcactcctcggactcccaaagtgctgagattacaggcataagcaaccatacccggccaatgacctacctcttttattatttctacaattctagtgtctttagaacctggtacataatagattttgtttttttgtgatggagactccctctgttgcccaggctggagtgcagtggtgcaatctccagtaactgcagcctccatctcctgggttccagtgattctcctgcctcagcctcccgggtagctgatattacaggcacgcgccaccctgcctggctaattttttttgtatttttagtagagacagggtttcaccatgtaggccagcctggtctcgaactcctgacctcaggtgatctgcccgcctcagcctcccaaagtgctaggattacaggtttgagccactgtgccagcataatagatgtttattaagtgttagtctctaagaaagtggggctccctccatttttatatattttaggatccttttagtgtctcttcggaaaaaatatttgaggcaacatttaactatttttgactgttttcactattctttgtgttcccttgcgtatctttccacctgctttatgatggacaatttgacactgtggcagtgcctcctctccagtcaactgccagtgggacttctatgccccttggtcagaatgcaatggctgtaccaagactcaggtaggaccatgcaaaactttgtatttgattatttattgcagaaatactttggcatggccaaaatggtattaacttttgaatgttcattaaatagtgtcaatattttttgaaaactatgtttgtaattttgaggggagaaaagtatgacttgtttaataattaatatggtaataaagtaacttgtaatattgtaataaagtaacttgtatattcatttttctagatcttatcttggagctagaaatgtatataggctaaaagttcaaggcaatttactaactctttaactatgagagaaataggaataacatagaatgacatttttagataatgtaaaatgttttatgttcactgagttcaacttttcttctcatctcaaacaaacactagcaaatagcaaaatggctgcttgattttacttcacaaatagcgaacaaccatgaaaaaaattttgcaaaatgtcttaaagtttaattgctaagtaacacaaatacaatgttggacttaatgtggatattataaaaagcttctaaaaatgtttgtattccttattataaaatgttcactggagagaatacagaaagttatgaagaaataaggcattattcacaattctgcctttttctttttttgtttttgagtcggagtctccctctgtcgccaggctggagtgcagtggcacgatcttggctcactgtaatctccgcctcccgggttcaagtgattctcctgcctcagcctcccaagtagctgggactacaggcacgtgccactacacccggctaattttttgtatttttagtagagatgaggtttaaccatcttggccaggatggtctcgatctcttgatctcgtgatccacctgcctcggccttccaaagtgctgggattacaggtgtgagccactgcacctggccaattctaccatttagaagaaacaaattatataacagcatttggtatttattccctcagctctgtctactttttctctgtgtgtgcttataattaaaaaaattgagattattttatcatagttttgtattctattttaatctaacattatactatcagcaaaataatttataacagcagtattatgttccatgatatgaatatagccttcttatttttccacttttttattgtttgatatttaagttgtttccatttttgttataaagaaaactttaataaacatttttgaatgtagatatctgtcctcttttcccataattttctgaggatagtcctagaaataaaatgtttatcttaaagtttctgaacatttcaagagttaaatattctagaaatagtccagtttgggtaaaattatatttaaaaatcacttttaattattaaaataacagaatcataccatagaagataattattattttgaagcatcatcattaagatcaggtatttatttagtacctacatgagtagtattttcaaaacaaattacatgaataaagaatttggcttctagcaagtataataaataacagctctgattacaggcaaccaggtacatgaataacaagcaaaggtcaaagaaacatcaaacacgttaaatatttttatcatttaaagagaagaaagaacactaaatagaagcagagagatagagggtgttttttatacaagcaatttttttctttgagtgaaggtcattatgcaatggatacatcctagattataaaaacaaaattttcattcagaaagagacaagtgaaaatgagaaaggggttgtagggtcagactttgacaggtgagaaggagactgtggagagtggctgccatcaagggctccctggtaatatggagaagaaaaacactttcttatgcaaacaacaccatctgggctctggaacttcacaaaaggacactgttaagtcacacatgagcggtatcttcatcacttacaaagggactaaaaatggtatcaagaaaccttaccgagttccattccccactcatattcctctgtggctcctttgcttaaacatgatgaaagacaccagagccatgctcaggctggtgcgtacctgctcagagttcaaattatggccactgtgacccctcatgccaaggaattcccacttctaacccaatttaggatggatgaataagttcgacattgatatgtacagcaactcttccctgttgatcttcactcaaggtttaaatcctcaggacgctcagttttggttccgttttgtttgttaatggagaagaggtgagtagaggaagaggcctggaagatgctcactgattgccaggggtagatctttctttttgtttgaatgttagatacatgtcttcatagtgaatgaggattaaataaactttagtatgaattagttgtaagtttctcatttagtttgataatttcttcagttttcctatattcttttccctcaagaggtttgtattttacgtattcctttgtagatgtagcttcacctttggattacttaggcttctgttttgtaaatttgacttccatattcatgtatttctctctgaattgtttttgcttgcctttcttcctgaagaaggcttacagtttagctgaaaggaatcaccatcactcttctgaaggtttccttaactctgcttcatcttaacccctttcccagtaccttatcctctctccagaaaaagtcatttcactttctctaatgagctcttggaacacagatttggtaaatatattaatcattctatgctctaatgtatttgcttatgtgtctaccctctaagctttactcaggttactttcttttttcttttctttttttttttttgagacggtgtctcactttattgcccaggctggagtgcagtggcatgatctcagctcactgcaatcaggttactttcttaaagattcactaacatcatttttttttttttgcatttaatcctgaaagtcaatatatgcctgggagctctctataaataatagccaacatgttgcttaactcaaggacaaataggtctgtgaattcattgattttgaggttttatttctgtagaacaccagaacaattttccagacgttgtttttctaattgtattactttttctcagattttattactcagataaaggaaactagagatttctttgaaaacaaacaaataaacaaacaaaccactgcctgctttgtgtttagactcgcaggcggtcagttgctgtgtatgggcagtatggaggccagccttgtgttggaaatgcttttgaaacacagtcctgtgaacctacaagaggatgtccaacagaggagggatgtggagagcgtttcaggtgcttttcaggtaacttgttttccataggctcagcatgcagattgtaaattcaaacgttatttggtgaacttgctcgttatatatttgttaaattttactgaatttatattggcctaaagttaattcccccaaatatcatcaggatttttgttggtatgttaatcatccactcagctatcattttttcaaatgcaaggggatgcatctggtaataaacataggaatgctctttgtctctttgaatggaactctagttactgacagacccaaaaagttcttgacagtgtattttgagtaaagatgcagagtgagtcttgtacatatattgagattagacgaaaacaatgttactgcctaaattattatatctacaagaaaagcaaccctaatgaactgattaaggagcaatacagttctctcctatgcatggggtgattgaaacaccagttttggcatagaatattatttgaccaatactctatgttgcatttatgcagtcagattaatgtaacaacatttagtaaacatttatgattcttgtttcaaatagtggtgagagttgtatatacaagtgaaacacatgcctcttccctcacaaatattaaagttttatgggcagaatagtacataaataatccctgtgttagaagtgctcctcagtgatacctgttgaacgcttattttactttcaaaatccaaattagataaccactccttcaggaagcctgccctaaatccccaactgatagaagtaattaagcaatcacttccatattttccttatgcatattgtaccatctgtcatttggatgattcgttggcctgaatgtctctcttggtgaactgtgaactccttgaagacatgaattatatttcttacatgttgacttctggagtccctggtacataataagttctcaacaaatgtttgctgcattggattgagtggcagtatagcagggtacatgtcctataaggacagctgtgcaccaaacatcctatgaggacatagaggaagaacatgcatcagagcctgtgaggcagcgatggttttcaagaggagataatgtttaatttgattcttgaaggacaagtaagagataggtagagaaaacccatctaggcagagagaactaaccaagcgcaagatcattggagatgacagaaagcttggccttttattcatgcaggtagtctggtatgactagggtataagaagctagtaggagaatggctggggatgatgctggggagataggcaggaactagatcatctggtactctccagtgcttccttggtactctagatttatggctatcataacaattatgatctatgtctttgtagtatttcctattagattgtaaagtatatgaaaagctggcaaaggccatttttattcatattcgtatcctagcccctattgtgctacggaaatgttgaattttaaccttttgataaaattgtccggctcttaaagcttacaaatttaaattaccaaaaaaagctcaactttgtcatcttagaatgacagaaaaaaagtgaaagttgaagggcaggaagtcagtctattttctcagtagtcggaattatataatttagacaagctgcttgatgattatgggtgagatcctgaaattctgaattcagatcctattttcaattttgtgtctgattgagttaagaaccatttccatgtgccataaaatggagacaaaatactcactagtcctttccgagacactctgaggatttatctcccatttacattggcgtatcagtgcagtgttacaggtagcaggaaaaccctttttggtcctgggtagtgtttctcctcttccctcttttacatttgcacgtggatttctctggtgttcaggtcagtgcatcagcaaatcattggtttgcaatggggattctgactgtgatgaagacagtgctgatgaagacagatgtgaggactcagaaaggagaccttcctgtgatatcgataaacctcctcctaacatagaacttactggaaatgggtaaggtgctgggcagcctcctgagtacatcagtgaattgtagttttaaattttgttttattttatagtttggtaagtctacgaacaagtcttctaataggcaagattattcattggctcagagctctttgccacatcctgagacagtatttttgttcacacatgtatacctgtagatacatgtggtagatgcagagtgaccccttgtcctgggatggtcctagttttagcgctgaaattctaattccaagaaacccctcaggcccagggaaacctggacagttggtcacttcatgggggttggaagggagggagagagagagaaaaaatactaattcaataatgtggggctattcaagagaatgaagagacaatagaatgagaacaggatgagaagagagacagaagcaagtgtgttgtaatatccaggctgaacagcaattgtctaaactagccaagaacctgtttccaagtgaaggttggaaaatactgtgtttacgttatcaaagagaattctgaagaatttttaagggtcatatgacttgttaaggtttcaagacctaaaaataacctattttagagtgaaagaagtaatttttctgaaatattttaaaatttattaacagagaaatagggtaaaattatttgaaagagtacaccattcagtatgctaagaggcaattagttaaaatttattatagagagctctctctcctcaagagtaaccttaattgtattggttttatctacagattcaattcaaaaccagctgttgccatagatacgaaagagccatgtgtttcccaaatatgttcttagatggaaagaatgttggattttctgagccattagttttagtgattataccaagcaggggaagctggataatgtatggtgtgtattaggatgctgtgctcttcatttgaactctctcaaagaagtgtttaagtgtaatgcattttaagaatttgtagagttctgtaataaacttttttccccaccaagtgctatttctggtttttaacggctttttatttcctccttctcctcctcctccttttaacagttacaatgaactcactggccagtttaggaacagagtcatcaataccaaaagttttggtggtcaatgtagaaaggtgtttagtggggatggaaaagatttctacaggctgagtggaaatgtcctgtcctatacattccaggtacttacgacgttattgatttccaatctggaattgtcagagagcattatttatatgatattgacttttacgtatttgttgagaatttacttatggcctaatgtgtggtcaatttttataaatgttttatgttgacttaaaaagtatacacagtgtttttgctttggggtacagggcaatgatacttttaacatgtgtcattcaagctgacatatccttatacctcatttgtaacttcatgttctatataggcccaagaccttattgtctgtgctggtgtaggcattaaactgaagaccctgtccatgactggtaatgatagtctcctgacactgctacagtgtcagctcacttaaaatgcttttattttaaaattgtgaactatttcatatatacaaaagggtgtggataacatatatgtgtaatttgaagaaaactgcccttatatgcccaccatctgccttaagaaatagaatattgccagtgacttaaaggctcctctatgcccctctctgatcacatccctctcactcctcaggcaactactattttatattttgtattaattatccttgttttttctataaatgcttattctttatatgtttttgtccctaaatataaatttgtgatttagttttgcctattttttccatttgtataaatagaatcatatctattcttctgttacttttttcactaaaagttatggatttgagatttactcatgctgttgcaggtggcatttttattgctgtttccaattttttcttatgaaaatgccttgaacattcttgtgcctgagtcccatacaaatgaactagagcttctccagggcatacacctggaactcaaattgctacctcataggatatgtatgtactaaattttactaggtaaagtatccaaaatggctggatcatttcataccccagcagtggggatgagtggcctccacttcacatgcttgccaacgttggtattgcttaactttttaattttgcttatgatctcagatctcctctgtctccaggcttctgtttctcaaaagctatttctgtcatacacacctaaactcacccgtgagtaggttttgatcaacacaatacgtactcatgcaaaacagttatggctttaggaaactttacggaagatttagaaggaagatagaggagagattttctgttgcagtaatgcaaacatgttgaagcaatagcggttggcatcttctatcttaaaacacttccacagcctcaacacaacgaaatttctggtctcatcgggtgttagcttctttcttgctctcgtctttcaagatcccctctctcactccttttcctccctttgtccccaaactccaaaaatgtctaattcagcttttaatattgattacttctaaatttgtaaacccaaactactgaaatgttcagacaaaagggccttttgcttacccaaattaaccttctccagaaagcagctttgattataaatagcaaacataccgtcttccaatttaccatagaataagttagttgcatttaagagttgttgagtaatataaatgagaagtaaaacagatctgaaaaataattgtagctaccagtttttgaatacctactgtggcatctacactattttaggtgattagcataggtttaattctcacagcagctttggaaagtaagcaatattttactattttatatatgtagaaactgaggcttaagaggacttcagctgacatactcaaagtcaccaaattaaaaagtagtagagcttagatctggtctgtcagatttcacagccttttatttttccattacattttactctccccatgtgtttcacttatttttcaattctaaattcaacgtggtgaataacatgtattacaatttaacctttggccagaaaggagaatgtaagacaggcatatacagataattttttttctccctctataccttagagaatatgttcctaattctttcataattataatgtggagacttgcatgtatatttttgaaagggtcaaatttagaaagttacagagcagagaaaataataagaaagagcgtttctgacttcgttggaaggtagacaggcaggaagtctgcatttctgaagaagagggataatttattaacaacgtgatcctgacattcattttcctcagcagggcttggtctttagattgacaactgaaatgccttccccatcactgaatgtgaaggtgtttgtcagagtagagggaaattatagcctgctatagaatgaggaacagagatgttttgaggagcagtctgagggaagtgaagtggaagccacaggcagtgagtcagccatgcaaatgctaaactcaggtgtggacgcggaggtggtgaatgtcctccatggttcaaataaattcatctcgggcccactgggtattcagctctctttgaggtggaaagtgacttttggcttattggaacataaatattagtagtaaatataaaacagaatcggccagtctctcttataatccctgtttcggtttttagcatcgcggtttatccagggcaaacccaatttcttgtcgagtaagctacttaactttgatgctgtgcacattctctgtctacttatacattttatacaacaaggaaggcatttatggcttgggaaggtgcccctctgccttgttcagcctgagagatagcagaggactattgtgtttattctcagtgtgtgatgaattgcagaagggaatgaattatgatcaaggtggaaaaacttcatggcttcttctgtgtttggtcttgaatatacttcattatatattttgaagagaaatcctaaatgcatatcaaattaaaaacaaaaacaaattctaaaggcaattttaatgaatgctgcattatctaagcctttgcttcctctgttggtatgaggactagatacctgagatttctaaatctaccttgttaaaggaataatttaaatgatggttaaaaatatctcacatataagaacgctttgtatactaagcactgttccaagagctttacatggacctattttccttataataacctaaggaggtaggtactggcatctcattttacaaatgataaaacagaggcaaaaaagctaaatagcttatccacagcatagaagatgacaaaggtgggatttgaactttagaagtctggctccaaaccccctcagagcagacactatacttacaagcattttatatagtatatatatgtatgtatatgcagtgaatatctctatatctatatgtatatcgtgtctcattctatatgtgggtgggagtgggagagagagagaaaatgaaaaaacaagagtgcaagaggaacacttctttttttttttttttgagagggagtctcattcacccatttgcccaggctggagtgcagtcgtgtgatctcggctcactgcaacctctgcctcctgtgttcaagcgattctcatgcctcggcctaccgagtagctgggattacaggcgtgtactaccatgcctggctaatttttgtatttttagtagatacagggtttcgccatgtcggtcaggctggtctcgaactcctgtcctcaagtgatccacccgcctcggcctcccaaagtgctgggattacaagcgtgagccactgaccctggcccgaggagcacttttgaataactgaatgaagttcaaactggctggattacacagtgaagtgtgaagagttgtaagaaatgaggttatgagtgatcgggaaagtaaataaaaaagacttttttctggttagttaaggagattggattaaaaaaaagagtcagagagtttaagaagggttgctactcttatgaacagtggagaatagattggagggtggccaactgggggaaagaaccttggttagaaaactgttgtaataatccctgagagacataagagcggcctgagaaaacttggtgagcggctgaatgcggggtatgatggagagtgagcagtctgggatatgaatgggtttctgacttggaccaatggccagatgaaaatacaaccctctgagatgggtaaagacccatttgcagggagaagacaaatccagtttaggtatctaaagtatgtccaagtgctcaggagaaagtgtttgagctggaaatagacatttggtgattattggtataagaatggtaattgaagccacagagtggagaacactgttcctcttggaattagcatagaggagtaatagaaggagatgcgtaaaggagtcttagaaggaacagccagagagaaaaaaagaaaactagaaagccaacagaagagagtatttccagtaggagagagtggtcaacagtgccgaatgatgttgagagaagtgttcactgtctggtgaaataagaaaggtgccagcagcattgctggaagtcagaccattgtaagcggaagagtgaatgggaggtgaggaatttaagataattaattatagtcaactcatttaaggtggtgagatgggaaagtaggaaagaaggaatatatagtaacaggtaaagcatttcttattttagttggttgtattagaacatgtatgttttgatagaaaggagccagtagagcaagaaaaatggaagctgtaggagagggaacaatcaatccatctaatccaccctttgaagaagtcagagagaatgcaatacagagaagagagagaaaatttatcctaagacaaagggagggacacctatagagaaaaagaaggaaagaaaagttaataagtttgtagatttgttagccagcagtttaagaggtctctgaagatgggagtttttgtaaagaaagaggtaagatcatcttctgagagtgaaggaagtgtctgtagaatcgaggaattgaattttgaaaaattttcaaaattttgcagaatttaaaaataggtactgtagagaatgggaggagggaactgactagagaaataaagtattgttggctggttttgaggattctactgaagttgaaaagcacgaatggatttgtagtggcaccaatccgtacagttgtgcgattttctttctttctttttttttttttttgagacagagtcttgctatgtcaccaggctggagtgcagtggcgtgatctcggctccctgcaacctccgcctcctgggttcaagcgattctcctggttcagcctcccgagtagctgggattacaggcacgcaccaccatgcccagctaatttttgtatttttagtagagatgggtttcaccatgttggccaggatggtctccatctcctgaccttgtgacccgcccaccttggcctcccaaagtgctgggattacaggcataagccgccacgcccatgcctggcctagcaagccctggctgggtttttgccaggaaaacatgatagcaggtcatctaggcaaggaagttaaatccattggcaagagaatgattgaagtcatgagccaagaagcctaagctgaaacaggaaggaagtgaaaaaactgaaagtattgatagggagaaagggggagaataagtggaagaacatgtttctataatgtgaaataatagatgtggcaataataaaaatgagagttaaaagaataagagatgttagaatataggatggttgaatttgggatttcagaggaagaatcagtcttggagaatccaggatctaagctggaagaaggagggtattaattaaagaaaatttaataagaccacaccactttgagaaagatgattcctgcagctatgtgtaggtagataggagtgagaagatgctgaactaaagcagctgagaggtttatttgtatttgaattgtggatataaagacaggcggaaataggctaattttttttttttttgcattgaaagggatgtgtataacttttctttctccaaagagataataaactaaatattttttaaatcaataatatatatgtgtgtatgtgtatatgtgtatatacatatatgtgtgtgtgtgtatatatatatacacacagacatatatatattctcccagcccaagctgaatttttgcatctgacttttaaacaaaccaatttcataatgtgatggaaataatgctctaataaaagatttgttgaaatccatcttcttatctttcttatctttttagcatgcatatctaatactcaatgggggtagtgataacagtcatattgtattttctggtattttggtgtatttctgtcttgtattttttgactgggcatatacttgcatgattgtggttaatagcatcttcacacttatacctgtcttcttatttaatgtgacaacatgaatattttgctttcacaagcatcatttagtatgactgtgtaatattgtcattttctttccttttagttttcaaaaaagtatatcatttccatcagttcaatttcctctgttccttatgcttggatctcaaacgcagatgtgtatgtatatataataaaaacacaaatgcttgtgaaaggagagctcccaatttgaatatttatatagaacaaacacagtgagagggagtcttcttgcctgatttgtttcattcccacagggactgacatttttagcaaattagttgtctataactttaacaaatcaagagagttttacatgaagagtcaaatttatcccttggaaaaaatcagacaatttgtcaataccagaacctgtagttacatctagtgactgtctagtggatttgagtgttgtgtgtcccttttagacagggtacgtgttcactttttcatcaccatgctgtccactggaggtttccaacattgacattacttgccagttccctgtgggcatttcattttgacacttgatctaaagcaaaataaaggataaatgaatgattgtctcttcaataaaagctgaagctgtcacttctcatttagctacatgtgactaacctattgtctactttaaaattcttttggggtgaccctttcttctatctagcaaagaaaaaaatgcaattttagcatttatccaagtgaaacagaattagaaaattaaatccactattggatcacatagaacattccaaaacaaagtccaaaagagctaattgtttcatatcacctatttgcatctctgttcctctttgttagatgaaaaatcaagaacgaaattctttctagttctctgtcagtgtagcttttgttaatttgctcgcttctgggccaaatgctgacattaaaggaacatggaagttgtttgtacctaaatgcattttgtgagtcacttgggattgccattgttggtaccatgtgtcctgcttaataaaaaaataatcgtagaatgaactctttccttataatcatactggcctggtcttaatgagagtcacagttgctttgtgccaatgaagagcttttctctttgggaagattgcatgaagaaagtatgcatgataaaggatccagcattaatttagtcatagcaaaatttttcattttctttgtaggtgaaaataaataatgattttaattatgaattttacaatagtacttggtcttatgtaaaacatacgtcgacagaacacacatcatctagtcggaagcgctccttttttagatcttcatcatcttcttcacgcagttatacttcacataccaatgaaatccataaaggaaaggttagtataaaatgtcagttaacttttccatgttttacttttttaagtattgcttacattaataaacttgtatttatcaaaaggatcagctttcatattaaaattagtaatagtaatagtacttcctttaagagtcaatgcaatatctttctctaaaaggtacaatattgtctcattaaatctctttgataatatatttatttatactggccaggcacagtggttcacgcctataatcccagcactttgggaggccaaggtgagtggattgcttgagcttgagctcaggaatttgggaccagcctgggcaacatagcaagaccctgtctctataaaaacacaaaaattagctgagcatggtggtgcatgcctatagtcccagctacttaggaggctaaggtggaaggatcacttgagccttggagggagaggatgcagtgagccaatatcatgtcactgcacttcagcctgggcaacagagtgagaccctgtctcaaaaaaaaatacatatatatatatatatatatatatatatatatatgtatatttagttatagttttaaacttctcattaaaaatatttgtttttatttgaagatgtttacaaagcccttattaccttgaaatcttctattttaaacgatcttaaatttcttaaatttgtgattactggtgatactattttaagtgtcatatacaattttaaaaaatctaattaatgcttatatatgcttcttaaatgcaaatgctagaggctttttagatggtgcatgaagataaaatactttaaaaacactttattacttttgagataccaacatttttatctaaggaagttaaaagacatttttaaatacttcattgttttgaaatactaaaaccttcctcttgagaaatctgaacagtagagatggattgtactaattgatatacagttatggctgaataatttttttaggctaattattattcacaatctgcacatttcatcacatcttaaagttagtaacttgattaataaatcacttaggaaaatataaggaatattgattttatttgttttatgactgagaaactgactatggagctatgagttgtaaaaacatttattgtctccacattatattgttcacaaagtggggatttggcaaaagtagatctgtgatctgtcttggacatcattaaaagatgcttaggaagtgtttaaaagacttcattataaagtagcttcacctgcaaataccctagcatgggagataaatcatacctacaagtcattgtcaagatgtggaccatagggacacattattttatatacttatatttatcagttgatagattaattctctttttctagttgaagatggcatagcaacttggtcttggggttttggagtttatataagaaattatcatataatttcttcacctgtaatctcagcactttgggaggctgaggcaagcagaccacttgaggtcaggagttcaagaccagcctggccaacatgatgaaaccctacctctactaaaaatacaaaaattatccaggcatggtggtgcatgcctgtaatcccagctactcaagtggctgaggcaggacaaagctgaattttcctgaattaatcctgaaccctgaattaatgctttgttgatttcatattgagagaagggtcctcactatctgtccagatgtgggaggggatggtggcttaacatagcattactcagattttttttttttttttttttgatattgggtctcactctgttacccaggctggagtgcagtggtgtgatcacggctcacttcaatcactgcctcctgggttcaagcgattcttctacctcagccacttgagtagctgggattacaggtgtgtaccaccatggcaggataatttttgtatttttagtagagacagggtttcatcatgttggccaggctggtctcaagtgctctgcctgcctcagcctcccaaagtgctgggattataggagtgagccaccttgcctggccattactcagatattattactatttgagactccaaatattcctgattgcgtccagtaagtgggcccataagagtgctcatcatgcgtcaaaaataaaaattcttgtagtcttggttgattggagatgagagctgatgaaggtattgaacagagaactatttccattgcctttttatcttccacctaaaactccttgtactctttcttctttccacagagttaccaactgctggttgttgagaacactgttgaagtggctcagttcattaataacaatccagaatttttacaacttgctgagccattctggaaggagctttcccacctcccctctctgtatgactacagtgcctaccgaagattaatcgaccagtacgggacacattatctgcaatctgggtcgttaggaggagaatacagagttctattttatgtggactcagaaaaattaaaacaaaatggtacagtattaaaaaattcgttgtctaaaggcatttctgggattttaatggggaaataacatgtagttaatgtaagcttttgagctttaaaatttgacaaacagaaatttaaattgcaaaggaatctaaaattgcaagaatgtattattgtctacttaaaatcttatatggtttaagaaaagcctgtctactgttttgcatagtaccttgagctaaatcattatcattattggctatctctagagggtattggctgggtttttagaatgctttttaaactttccactttctcaaactaaacagcatttctcaagaaaaactaaatgaggaatttagcaatatttcagaaatcaagatgtttaaataagtatttcatttacctttgttttttaccctctcattcttttaaaaaaatcctctctgaatatcataagtttgtttactacttaatacttgtaacaatagcttaaattgatgggataccttcctcatgacaagtgagttacatgtattagtaataatccttactactacccaatgagatgggcattataatctctgccccacagtgagaaatagagactcagtgctattatgagacttatccaaggtcatgaagattgcaaggagggtatttaaggctgggtctaactggcctcaaagtcagtttagcttattccttatgctatgtcactgctaaaattgcctgattttggttagaatcaggacatacccctgaattaatgctttgttgatttcatattgagagaagagtcctcactatctgtctagatatgggcagggatggtggtggcttaacaaccactcctcctcttcagagactagccttggcttactaatgttccaagtcaaaccttttttttcctaactttgtcttttagctgatgcccacatttccctctctattccaaatcccctcttcaaggtctttctcttcagaaaagattctgttacaaccttggagaagaataagatctcttacataagattcagaggaagtcttttagctttttaaatgggtaaactataatattttttcatttccactgagctatttttttttgaagttctctactacataaaatttaactagaacttgatcttttcaaatcttataggttagaaatgagtgcacaagtacaggtttttgtagcaacgacaaggacactatttctttggagaattaatccagcaagtagtttggtctaaattcagttttacttctttttattgcacttaaaagaaatggagaggattaaaaaaacattccaagctggtaaaattaaatttttcagtaaaaattttactcttgagcagtttatgtttttcctaaaatttttatttaaatataatcataacctctgggatatagtgtatgccccaaataattgttctttaagaaacattaaggttattgtaatatagttagtaaatgagaaaatatatttgcacattttagtatttttctatcctactttcaaaaaatgcattggcaaaaaaaaaaaaacacaaaaaactccccttgataatgagtagaaatgatcacattctaagggtataagtcatgggaaggagatgttggaagtcacagatgttaaagatggagagattgaaccagtagaacttgaattttaggagttaattcctgtggaaacagaagccagctttgggagccttaagtagatttgctggaagaagctgtcatgctcctacttttattgatttatcttatgcctaagaagctgactgtaaatgggtgaaagatatcactctttggggtgttcaatttctactccctgcacctttttatgtagaaatctcttctgcctcccctctgaagctgatagaaggaaaataacaaaagtcaattttttctgatctttgactcttctagagcacttgaaaatgttcatatcatgtcactcttgattagatggccatagtagcagcaaacaacctcttatccctactctcatatctgaagatcttcaaggaatgcagaaattaaacatgtctcttttacattttctcccctagattttaattcagtcgaagaaaagaaatgtaaatcctcaggttggcattttgtcgttaaattttcaagtcatggatgcaaggaactggaaaacgctttaaaagctgcttcaggtaaatggaaaaagagcagtttgcattgcaagcttaacttcttttttttttacttttaagttcaagggtacgcgtgaagttatgtaggtaaacttgtgtcatggggctttgttgtacagattattttgtcacccaagtattaagcctagtacccactagttattttttcctgatcttctccctcctcccactctccactctccaaaatgccccagtgtgtgttgctcctctgtctatttccatatattctcatcatttagctcctgcatatatgtgaaaatactcaatgtttagttttcttttcttgctttagtttgctaagaataatggcttccagctccatccatgtccctgcaaaggacatgatcttattctttttttatggctccatagtattctatggtgtatatgcaccacactttatccagtttatcattgatgggcatttaggttgattccgtgtcttcgctattgtgaataattacaagcctaacctctactccagtcttctattgttaattcttgatctccaaaggcttttgaggctttatcaggggttctgctttgtgttttaaaaaatctatttggtaatttttgtctctgctctctctttcatgtgtcaaggtagtgagacatcacacaggatagggagttcaccaggttatctcctctgtattataaatatgttatcagtgtgcagcacttttctcctttatgatgattggcaaacaagcctagacaagtgacaatatcaagagacagttcagtttcacttgctgacatggctactccgtggaggtcaggtttttggtgcatgctggttggcagtggagatggggggaaggtggtatgctagtctttgggtgattgaaggaggactgaaagggtaaactgatctagactgtgagggtaccatgttaaggagtttggatttcattctgatggctattgggttccattaaaagatttaatacatggagtgatgaaataaaagtttacctaagtaaagttgtagagaataaagaagaatggagaaggaaacatttggcaggattaaaaaacaagagatggaaagtaaaggaggagtgaggtcaacagagtgaagataaggaccaaaaaatgttcactggatttggtgattaagacttagttgctgcttttgagaagtgtccgttcatgtcttttgtccatttttaatggggttatttattttttacttgttaagttaagttccttatatattctgaatattagagttttatcagatgcatagtttgcaaatattttttcccattttgtgggttgtctgttacacattgatagtttcctttgctgtgcagatgcaggaacaggaaaccaaatactgcacattcttacttttaagtgggagttaaacactgggtacttatggacataaaaatggcaaaaatagtcactggggactgctagagaggggaggaagggaggaatcaagggttgaaaaactaactattgggtacttactctcactacctgggtgttgggatcaatcacactccaaagctcagtatcacataatccacccaggtaacaaacctgaacatgtaccccatgaatcgagaataaacgttgaagagaaagttgcttttaaaggaagagattccatagtatggtaggggtgtaagtgagactgcaatgcattgtgtgaggccatagactgagcagtatcagagtttaaatcctcttggggtaatggcaaaagtggacactgacccatgtgtcatggttctcagtgaagaagcagggattcttgggatattggtagatgagtgcaagaaggaggaagataagtagtaaaaccaggtttatgtactcattcacttgcttcattcatcaactatttatggagtctgtggtatgtgccaggaatcgttttagacactcaagatatagccgtgaatatgccagagaaagtgcttgtcttcgtgaagttgacatgtcagaggaggaaaagtttttgaatgaagtggaaaaagaatgatctgaacatagaaatggaagtgagagctttgagaagatgttgacatcagtcttcagttgggctggcagttggaagctgcttaccaattttattttatttcacatttaacaaacacagggcacctactgtgtgccagcacaattttaagtgatgtacaaaaataaaccagtgtagtcctcctacctatgtgttaagtattattcatattctcattttacagacagggacactgaggcccagaaatgttgcccaagattatcgttaataagaattagatatgaaatgcaaatgcataaaatttggcttaacagtctggggtcttgacttgcattgggctgccttttctaggggaaaagagttagctggaacagagagctcactggggtatggaaagggaggctaaagccttaaaaaaacatcatgatggtagaatctgtaattctttttatttatttatttatttatttatttttattatactttaagttctagggtacatgtgcacaacgtgcaggtttgttacatatgtatacatgtgccatgttggtgtgctacacccattaactcgtcatttacattaggtatatctcctaatgctatccctcccccctctccccaccccactacaggccccggtgtgtgatgttccccttcctgtgtccaagtgttctcattgttcagttcccacctgtgagtgagaacatgcggtgtttggttttttgtccttgcgaactggattaagaaaatgtggcacatatacaccatgaaatactatgcagccataaaaaatgatgagctcatgtcctttgtagggacatggatgaagctggaaaccatcattcttagcaaagaatctgcagttcttacataggtgtgctggctaaggcagtgattctcaaactttaatatgcatgacgcttacctgggggattctcttaaaatgctgattccaaaggttactcattctctcagatattctcctgtaggtcttggtggggactaagaaatctgcagttccctcagatgattgtgattcagtaatacagggatgggacgtgattcactgcattaaaaagtgttactgtatatattgaaaacacagctaacaatgaagacgaggaagcatcaggtgatttgttaaaactattaagatttacagtcacagaaagtcaaatattgcatgttctcatatgtgagggttaaaaaaattgatctcatggagatagaatagaatgataattatcagaagctggggaggaggaggggtcaatgaagagagattgcttaatgggtataaacctgtagttaggtaaaaggaataaattcgactaggcgtggtggctcaggcctgtaatcccagcactttggcaggctgaggtgggtggatcatgaggttaagagatcgagaccattctggccaacaaggtgaaaccctgtctctactataaatacaaaaattagctgggtgtggtggcgcacgcctgtagtcccagctacttgggaggctgaggcaggagaattgcttgaacctgagaggcagaggttgcagtgagctgagatagtgccactgcactgcagcctagcaacagagcaagactctgtctcaaaaaaaaaaaaaaaaaaggaataaattctagtgtttgatagcacagtcaggtggctatagttaacaataatttattgtatattttaaaatagctagaagacaagatttgaaatgttcccaacacaaacaaatggtaaggtgatggatatcctaaatatcctgatttgatcattacacattctatgcatgtatcaaaatatcacatgcaccccataaacatgtaccattattgtgtataaataaaaaataaaaaaacaaaaaaagaacctgtcaggctttaatgatttctgaatatgagtacaatatgcttattttatgaaattgcaaaatttggacagttacaaggaaatgaaaaccactcaaaatccgatctgcaaggttggaaatttcttgtcatgaccattacaaatggagataaagtatttctaaaattatgaggcacataaatggaaaagaagcttccattagcatttcacacttttcagaacacttttcatgcgttaagtaatagattcctgttaattaacagcttattttattcattgttagtataccagatgcaataaactgttttccttccaatattttattatgaaaattttaaaacatatagacaagaatgttgtaataaatacccatatacccatttcctatatacaattagtattttgtaatttcactacatatatgtacatataatattgataatattgactgattctttgaaatatatattatgtatttaaagtgtttataatatttgctgaactatttggaagtaagtttcagatatcataatacttcatcactaaatatatgcatgtaacatctaagaagaacattctcttgcataatgtgatactcacactaaaaatataaagaacatgaacaataattccctaatatcatctgctctcaggcaagagttgtttttcttttttaaaaaatataccttagttttggctaggtgcagtggttcacacctgtaatcccaacactttgggaggctgaggcaggcagatgacttgaggccaggagttcgagaccagtctggccaacatggtgaaaccccatctctactaaaaatacaaaaattagccaggtgtggtggcgtacacctgtagtcccagctactcaggaggctgaggcatgagaattgcttgaacctggggggcagagtttgcattgagtatgccactgcactccagcctgggctacagagtgagaatactgtctcaaaaaaaaaaaaaaaaaaaaaaaaaaaagaaaaccaccaaaaataaaataaatatagcttagtttttagaacagttttaggttcacagcacaattgagtgcaaaatacagagagttcctgtatatcccctgctcccacacaggcaaagccttccccactatcaacatctcctaacagagtggaacatttgttacaatggatgaacctacattgacacattgtcatccaaagtccataatttacattagggttcactcttgatattgaacatttaatgacttttgacaaatgtataacgacatgtgcccaccattgtagtattatacagaacagtgtcactgccctaaatatcctttgtgctctgcctattcatccctcccttctttctgaccacaatttatcttttgactgtttccatagtttggctttttccaggatgtcatacaatttgatagtttttttaaatacttgatagacttttcacttttcatttgctttcttctgtataggaacccagaacaatgtattgcgaggagaaccgttcatcagagggggaggtgcaggcttcatatctggccttagttacctagagctggacaatcctgctggaaacaaaaggcgatattctgcctgggcagaatctgtgactaatcttcctcaagtcataaaacaaaaggtatgtcaggctttgtttaaagcaataggaagcagtcatgtttatttgcatgaggaaaacgaaggtggttaaatcaagatggttaaacagacatggctgtaattagcattttccgtatcccaattatattttgtagagtaaaatgaatgcacacataataataagaaacagaaggtgtgttatactcatattttagttgcaaatgttaaatgtcttgcaatttccaagataaattaatgacaaaatttgcatttttaacttttgatctaagttcgattatgtcttccttggtccctaattcagaggagttataaattctagcaaggggaaggcatgaagttttgccttctgttatgttcctatcacctttctttgtgtggccatggcttgtgggctcctgaagtcatacaaagtaggatagtaacaagttggctggcagaattttaacatgttttattgttatcatcaattcttttataatgcaacaaatgtgtttctaaaaatcattgagctatgcaaaattgcacaataaagggcttaaggaaaaaaaatcaggttagagacacagcactcaaattttcatctgtcacactcatatgaaaaagacaggtgccaataaaaatacttgcatggttttatacatgttaaattattaaaaatgtatctatactacaataagtgtggtgcattacctagaaaaagacctgaagctttctgggttttggaaggtttacggcttgtgagttactgtgaagtgctagaaggacgccagtcagaaacccgacagacatttgtaacagcagacatgaacagtatagtttataatgcaggaaatgaactgacatagatgttgaggggtgtgtgagtgtgtgtgtgtgtcaacgcacatgcgtatgcatgagttttgtatattcctatgtggcttgtttccactgtgtgaagcattttgtgttcaccctgtgtttcatgtggacatagttgtacataagaaaatctcaaatctgtgctatactcaaaattttcagtatatcaatctcaatggaacaaattccccttatcaaaacaaacattatagcagaaccgattctatgatttattccctgcatgaaagtcaatgttccaggcaaagcctgattttcagagatacatttcataaactcaaaaattgcaataggtcctcaagtcccctcctaacacccataaattgcccattggcttccaaatatgggtgagggagggagggtgaaattttcctagaaagtcttatcttaaaggaccatctgttaatattcaaaatggcctgtattcattgtcagcatcccatacaaatctttagaaactcttgattacattaaattattgattagagaaagacacatgttctttaacagtctccatgtacttttccacataggactataaattatcatatttgtgctacctttttagcagggcaaaaaaggaacagagaaagaaaaggcactatgcaggtacaggtacatgactatgcaaagccatcgtgttcgcaacagcttgggctctcaggaaccaatggtgcatatctcttcccagttcaggcatcatggtggcagcctgaaattggctatggtgagagcagttacactgcagaaactggcaaatgctacaaagcagagacatttctgttcctgggagagcagactgttaaaactgagtcagcacatctgtgatttcaaggttgcttttcttctgaaatagccaacgcagagtaataatgtttacctgttttaaatttctccatgaggaaagaatccatgatttccactaagagatatgttaaatctctcagtcaggaaatttaattctaaatttaatttcacttgcttctttgctgtaactagaaaatgaatgtcctattttattttattttattttattttgagatggagtttcactcttgttgcccaggctggagtgcaatggcatcatcttggctcagcgcaacctccacctcccaggttcaagtgattctcctgcctcaacatcctaagtagctgggattacagacatgcgccaccacaccctgctaattttgtatttttagtagagacggggtttctccatgttggtcaggctggtcttgaactcctgacctcaggtgatcccccctgccgcagcctctcaaagtgctggcgttacaggcgtgagtcatcgcgcctgggctggtttttttttgttttttttttttttaaatcttacgcatgcacagaagatatataaaaaattcctcccccatgtgaccctaattttccctaagtttgtcttgattttgttgcaaagagagtgcactgttttcctttgtatttgcataagaaacaattgtaacaaacttgcccgtggcttttgattttgttttaatgagagtcgtgcctaaacatgaaaagcaaaatattcttgcctaaatccctgattactgactataatgtctttatctctatagctgacacctttatatgagctggtaaaggaagtaccttgtgcctctgtgaaaaaactatacctgaaatgggctcttgaagagtatctggatgaatttgacccctgtcattgccggccttgtcaaaatggtggtttggctactgttgaggggacccattgtctgtgccattgcaaaccgtacacatttggtgcggcgtgtgagcaaggagtcctcgtagggaatcaagcaggtcagtggggtgaattttctctagccaccctgtacacattgaaagggaattaccctgtttctctgctccttgagatgcttctttgtgtatgaagagatgaagtctcaaatgaatttagaatcctccttccctttcctacttccagattatagctactgtggttaaggctctttgctgttatctctatttatccatctgaagtaacagccccactgtgccctccacttcccattctctattagaatagagttatgattaaaacaccttcatcctctgtaattacctcaataaggttttgctgtagcaaaggtctgtggagcttgtatatttgcattgcctaatctttctgatggcatgctctttgaaacatttctatttctattctgtgtgatgtactatcaatcactcacaaatatttgttgaacatctgctgtgtgctctacggtgtatatggtgcttcaagcacttagtacagggctatgtgaaattgactttatgagtagtcaaagtatgactacaatctatatacttttgtttctatatttatgtacatgtctgtctcttctagaacgctcattacttaaggtcagggctgtttgattcctttctttattcccagagcttgacaaaaggcttgattcatagaagtcactaaatgaacgataaatgaataaatataagactaaactatagaggcttatatacaagcattacaaaggcatccttatccctaaatgtctctccaagtggcctgttctggtaattaaaattctacgactgtgattcattcctttgtggcttggatttccccttatctgttaaaatggaagcacactctcctgctgtctaattaaatagaatggtaacatttcctgcccacctccattcactgttgtgagaagtaaataaatgatacaacgtacgtaaaagtgctttgaaacagttgtaaaataatcaacaaattaaggatattattgcaagaggttcactaatgcaaccttaatatggacattcctagtctgtatgtagagccattctgaacattgtagaaaacctcaatgaagagtgaaggtaatcaatatccagaatgatctcttcctccaattaacttgttagcaggaagcatagcactaagttcccaagccctctttaagaacttattgatcaacctctttctcatcttgtaggaggggttgatggaggttggagttgctggtcctcttggagcccctgtgtccaagggaagaaaacaagaagccgtgaatgcaataacccacctcccagtgggggtgggagatcctgcgttggagaaacgacagaaagcacacaatgcgaagatgaggagctggagcacttgaggtaatggagacccgaccccctggcagttgcatagaacacagtaccctctgcagttagcatggaacacatgattgctgctgtcgagagatttagaagttaaatggctatttttaccagggactgctttgtcccttagcactagggtgagttgaaggagcttgctctgtgtgcttcaggttttcctgaaacaagtgttacaaaaggctgggtaactgggagtagtcctgctgagtggatacgatcattctcattcgttttggccacctacttgctgtgtgaccttgggcaagttactggccacatctctaaaattagcatgataatagcaggtaaactgatactaagattatctgtttattgttactgtcagaattaaatgagattaagcacccaaagtgattactaagcattcattaaagtttgtattacttttcagatacaccattcttactcatttattttttggattaagcatagagccagttgcttgagatggagaatatcttggtgggtaaacccagtagcctggcactaaacttcccatttgtcaggaccctgcaaaagccatctcaaaaatgctcagttgatgaatcatagccctgggtcagaattctttatgccacaccctactgttttacattgtccttagtaatttttgctgactggacttggcaaaatattctagtaagataatttgaaggtcatgtgagttgaagaaagagatgaggtgcttgggtatctggtagaagcgtagggtgaataaagaaaaaagaataagttgggaagccttattcctaaatctttggtgccttgtaatctggcattaatcagtatctcttgactgaggaagctggcaagcatgtgaactatggtgggaagaggatgctggctgctgtgcacatgtttctgggaggatgagggtctgggaggagatctctgagaggatgcatttttcctgctttttgacataaagctaggaggagaggtacatcctaagaaagtcattgaagagatttttcactcttggtgctcaggggaggggaagtatcatctttctcagtacaaataggaaaattaaacttgccacagtttcctcaaagtatggcaagattataaggaactcagatgagaaggaggccacactcccaggctatttgtactgctttctctcagattttgtgtctctagagtggagataatattagtgttattttgaccttagaggcagtcttgaaaaccattgtttaatgacagatgtcatcattatcattatctttattacaggctcccccaagagatagtcatagtgatggtaaagtgtcaggattggcacttgtgggatgatattaggacttctgttctcccatcttccttttaggcttaagattcttactccaagccttacttaaacttgctttcaccaaataatgtgctttcagttatacacgttcagaaaaaaatgtagacactaagacttcgtatttctctattgccttgtgagaggtagaaggtgcacaattgtaggagcctaattgactatacgtaaatccagctttggtatttattagttcataatcttggacaagttatttgaactttctgtgccattgttttttccatgtatctcatggtgttgctgtatgaattgagataatgcatatatgcagagcaactgccatggtgcctgacacatagtaaatgcttagtaaaaggtagttataattttgtgttacctctcttttggggtcactaactctaattaccttcttcttttttttttttgagatggggtctcactctgtcacccaggcaggagtacagtggtgggatctcagctcactgcaatctccgcctcccaagctcaggagattctcctgcctcagcctcctaagtggctgggattacagatgtgcaccactgtgcccagctaatttttgtagttttagtagagatggggtttcaccttgttggccaggctggtctcggaactcctgacctcaggctatctgcctgccctgtcctcccaaagtgctgggattacaggcgtgagctgtcgcatctcgtccaataccttattttcaatacagaattaattctgtattaaatgaatttcagaaccaaacggcaagaggaaaaataggttttgaaacaggtgacctctagaaagcagacagtagtatgttggccaaagactttctttttcttttcattctttctgtttgtttttcatactactgacctagcagctatttaaatcactgtcttttgttagcttgagtttatgtttgagttttctaccacaggatgtaagcagatatttggttctaagaatgataaaaatattacaccaatgtacttaaatgaatggagttccttcagatacaaaggagaaatccaacgtaatgcaaaataattattatactgtgcaaatcaatcacattaattacattttttttccttccaggttgcttgaaccacattgctttcctttgtctttggttccaacagaattctgtccatcacctcctgccttgaaagatggatttgttcaagttggttatgaaagatatttttttcctttataatgctctaacttctatctctctgctgagcccataacctattttcttcctccatggtgaagccgtgccaaaaatattttatatatgcattttagttttagtggtgagggttttagtgtgtgactttttttctttggcccaaggtgatgtgaattctgcagaaggcagtgtatcttctatggtgtgggaaatcaacactgccacccagtgaatcaaaaatgtaatcatgccagagggctactgaacactgccaccctaaacaccaaactgcgaatctacaagcttgctctttaactcacagagcttctcttatttttgccactgacttttttttttccccctcataactgtaggccctgggatgaagtattaggtttattccaggagtcaataagacagttagctagagtctagtgagatatggatcattctactttgagcaattgaaccttcctgttcaggaaagaagagtagtcatctgccatttgtcattctagggacttttgttgttcttggcttttgggacattttcgttaatgctgctctcagtctttatgacgaggctttggcctgaagccccagtggtgcctcttcatggctcacacaggatattgttcatgaggactctctccatgttaccagcactgctttcctcacaagggattttgcttttcaaaccccaggcccttgaacatgcattcactgaaaatttactgtttccccaaatgtaggcactattgggagatgaaagttgtgtgttcacgcaagtgtgtgtgtgtgtttgtgtagagagagagagagaaaatcaacctagcatctctaccacccattctgtcctaccacagccaccgtaattcatggagttcctgaatggaacatatgctcagagaataggccaagcaaactcatgcatgttagcaaaccatgaggctgctgtccccaactgcagtgtgtgtggtgttgttttaggagccaggagtcccaaatattgctctgtggactggctgcatccgaatgactcagggaacttaaaactagagatggctctttctcacttgtcctccacgttttctgatttgatagtttgggagtacagcctaagagtctattttgtaatttctacaagtgattatgatatacagccgcatttgtgcactgttgaatcagacttcctcatatgaaagtttttgttttgttttgtttttgcaaggtggaggaaggaataggatcatgagtcgaaacagaacatgtgctcctccccatttccctcaaacctcagcatcagcctggcccattctgttttctactaacttccatgatagagccagagtgggccaggaagcacatactgacaatgggaaggagatatcaggaaatcttgttctaatccctagagcagagctggtcaaggcctgagctccaagccctctcccaggcttgagtttttcaccatccccttgggtggaagacaatgagaagggtaaggaaagagagaccctaaatgagtgtgattacccttcatccatccccaggctcagacttcaaattccaccttgcttcgccatgaaagctcgcttcctgccattataggttagtgaaacgttcttgaatctgacccagccccagcagcattccatacatatagtgtggagtaggagggtaggatgggagaagatcaacattatgcttcccctaaaagttatcagcaagaaacttaaactttcatgaacatactaataggattggaaaatttctgggtgttcatactgacattttgtaggcagtatggcagtattgtcaatgaacagctcataatactttttttttttttttttttttttttttttttagagagagagagacagagtcttgctctgtcacacaggctggcatgcagtggcactatctcgcctcactgcaacctccgtcccccaggttcaggtgattctcatgtctcagcctcctgagtagctgggactacaggcatgcaccaccatgccctgctaatttttgtatttttattagatacagggtttcactatgttggccaggctggtctcgaactcctgatctcaggtgatccacctgccttggcctcccaaagggctagaattacaggcatgagacaccatgcccggcctggtaataccttaatatgaagagttgactgacaaagatgttctccaaatctaataaagaactgatttttcctaaaagttaaaggaaaagaaattatttggacagtgtccaaataattttaatagaatgtaattttagtagaatgcttagtatagtccttggtattttgggagcaatcaatacattatagacagtggtattaatagttttatttcaattaatggtggtgctagtgttactaactatataggggaaaatgtttttatagacacttttctgaatcaattaaatgtagcttgcctgatgattatgatttatagactgaatatatgtaaagaaacgttttgttaatgcaaaatagacaaactctttccttttccatcttttacttttgtttaggatgaaggtacaatgtttcctgtggggaaaaatgtagtgtacacttgcaatgaaggatactctcttattggaaacccagtggccagatgtggagaagatttacggtggcttgttggggaaatgcattgtcagagtgagtggcgtcagttgtatataatttaagatgagaaaattacgtggaagagaatgaatcaagataaataacactcaccatatggcccatgtgttggccttcctttcctgtaaggctgacatgatcctgttcaagttttaggagcgacttgaataagccctccgccttctctagttggtaatgttcccattcagtgaggtcaatttcattgcaatttaaaactttctggtgcaaattaaagtaggccagggaattctctttagatgaagaccattaggatattctttagagttcagttactcaggatgtaccacaatcaatcaactttcttaaatgctttgcctcctgttctgtttggatagaggcatctgaataacagcatctgcatgctgcaccaccctaaaactactctggcttccatctctcttgcaatataagtttgttcagcaaatgaataggccgagctgcagtgatacatttttcctaaatcagttgctctgtgctatatgaggaaagcgctagtgtacacacacacacatacatatatttctccctttgggaatatacctattgtgaaatttctgagtaattgggtattcatacattgggtatacatacatttagatttagtggaggctgccagccttccaagtggttgtactgatttacatctctagcataatctgataaatcaagcttgcttttgtccttactaacacttgatagcatcagacacagtggtgagtgtatagtgatatatatatatatatatatattttttttttggagacagagtctcactcttttgccaaggctggagtgcagtggtgccatcttggctcactgcaacctccacatcccaggttcatgtgattcttgtgcctcagcctcttgaatagatgggactacaggtgtgtgccaacacactctgctaattttttgtatttttagtagagacagggtttcactatgttggccaggctggtctcgaagtcctgaactcaggcaatccacccatcttggcctcttagggtgctaggattataggtgcgagctactgtgcccagcctatttttatattttttctaatgactaataatgttaagcttgttttcatatgttcgttagccattggttatattctttggagaaatggctgtctatgtcttttgtccattaaaaataatcggtttgtctgtctttttcttattttttaatttaatttaatttttaattttaatttttaaaaatttccataggtttttggggaacagatggtgttcggttacatgagtaagttctttagtggtgattgtgagattttggtgcacccgtcactcaggcagtacacactgcacccagtttgtagtcttttatcccttacccccttcccaccctttctctctgaatccccaaagtccattgcatcagtcttatgcctttgcatcctcatagcttagctcccacttgtgagtgagaacatgcaatgtttggttttctttctttttttttttttgagatggagtctctctctgttgcccaagctggagtgcagtggcacaatctcagctcactgcaacctctgcctcctgggttcaacattcaaacaattctcctgcctcagccttctgagtagctgggactacaggtgcacaccaccatgaccggctaatttttgtatttttagtagagatggggtttcactctgttggccaggatggtcttgaactcctgacctcgtgatctgcctgaatcggcctcccaaagtgctgggattacaggcatgagctaccatgcctggcacaatatttggtttttaattcctgagttacttcacttagaataatagtctccagtctcatccacgttgctgagaatgccattaattaattcctttttatggctgagtagtattctatcgtatatatataccacagtttctttatccactcattcattgactgatgggcattgtcttttacttattaatctctctctctctctttctcttggaatccttaagcagaaacaaatgaaatagaatatgaatatgaatatttgctagttgggagttaataaagccaaaagtttgttctttgaaaagattaataagaaacttctacttgaagggcttcttttcctttattgtgaaccgactgatgaaatgtctgtcttttaccttgacttttcaaaggattttttttttttctttgagatggagtcttgcttatcgccaggctggagtgcagtggcgtgatcttgcctcactgcaacctccgcctcctgggttcaagcgattctcctatctcagcctcctgagtagctgggacaacagccgtgcaccaccatgcccagctactttttgtatttttagtagagatgggttttcaccatgttggccaggatggtctccatctcttgacctcatgatttgtccgccttggcctcccaaagtgttgagattacaggcatgagccaccgcacctggccaggatatttttattaggtaagacattctaagctagcagttattttttattttatttatttatttatttatttgagacggagtttcattcttgtctcccaggctggattgcaatggagtgatcttggctccaatcttcacaccatattttggcagttcatgtgcatacactgcacagactatcacgttcccttctacacaggtctaagcaatctgacaaatgataactctgtttgttacataaaatatcatcctgtatttgggtgtgctgtatttatttttatcctgtatcaccaagcatttccgaacatagtgatcagttttaccctcttgtcatcttctaaatttcacttagtatcttttaaagtaggccttattattaacaactttaacaaaccccatcctgtgggacagagacctgcgtttgtggcttgacagagacctgcaggcccagtagtgctggggtgggaaaagggtattattaattgttttttgcttttggttttctccagcaactttactctgatgtctaggtataattttctttatatttttctgggcttttattgaacctgtgctttaagtcttttgtcagttttagaccatttcttgaccattatgtcctaaaacattgcttctgtcccattcttcctcacttgtccttatgggacacaaattatacattttttggaccattatattttttaacatcatttttttgtttgttttccatcttttccccctctgtttcattctaaatattttctttttctttttcttttttttatttgagatggtttgttttccaggctggagtgcagtggtgcgatctcggctcactgcaacctccgcttcccaggttcaaacaattctcctggctcagcctcctgagtagctggaattacatgcatgcagcactgcatctggctaatttttgtatttttagtaaagatgaggttttgccatgttggccaggctggtcttgaattcctgacctcaagtaatctgcctgtctgggcctcccaaagtgctgggactacaggcatgagccaccgcacctggcctcattctaaatattttcaactgacctatcttccaatttattaattctctgtatatttctgtataatctccttttaagaactctattatagagttttaaattttatcaattttatttttcaacttaaaacaattatatatattttatatatatatatatatatatatatatatatatttttttttttttttttttttttttttttgagacagattttactcctgtcacccatgctgaagtgcagtggtgcaatcttggctcactgtaatctctgcctcctgggctcaagcaattctcctgcctcagcctcctgagtagctgggattatagacgcttgccacagtgcccagctaattttgtactttttagtagagacggggtttcaccatgttgccgtggctgttctcaaactcctgagctcaagtgatctgcctgcttcagtctcccaaagtgctgggattataggtgtgagccatcgtgcctggctatttttcaattttagaggtttcatttgtctacttttttactgcatagtgaatttttaaattaataacttcatttttagagcagttttagcttacaaaaaactgactagaaagtacagagagcgcccatctacttccttacttcccgcccagtttccctattaggtattaacatcttccattaatgtggtatatttattataatgaatgagcctatattcttacattattatatttaaaaatattaaaatttttcacttaaaatatagtttttaagcgatgttttgatatgtgtaaacagtgtgtaataagcaaatcagagtaaataacatcaattacttcaaacatttatgtttactgttttatattttctaattctctgttgtaattctccatcttgtcatttaaaaaaatatattaatttcagttgtttcagggcctgtatctgttaatttcattctttaggtaagtctgttactgtaagtctgtttctattgttttttttggttggaatttggtcaattcttgtctttttgaatgttaaattagttttaattgaatgtcagactttacgtatgaaaatttaaaaattggatgatgctatcttcctctagagaagactaacttttgtttatggcaaccagtgaggctggcttatgtctgggttatctctattccaaggatgtggccattaagggattccaactgaaggtatgggctttctacctggccccttctttttgacaggactggactctagtttttaaaaccctggtcctgtgagactgctaaaagctgtttatctttttagcctctgagctatggttttctcttcagtttagcagcctttcagcatattttctttttttttttaatttacaaatacctcaaggaaaaatgtgttaccaaatgtaaatgtaatcaccacattagacttcccttctctctgaaatcttggactttcaaacttgcactgccttgttagtgctctgattctttcagaaatagttttccttttaattttgtacagtctttctattttttttgtcttggtaggagatttaatgtgaaaacagcaaacgcattagaaacaagcagattcaatactagattatgaagttttggaaggcataagatgtgacttgtactttgctgtgtcccaagcagtgcacaacatatttggcaaaatataggcattcaaaaagtgctgtggatttttgtatatattcatggagtattagctcaattttgctacactgatatatctcattgtgatgaagtcaaagctttcagtgcatccatcaaatgctgtttttgaatgaataaatgaatgaatgggttttctgatgacagtgctgtaaagatacagcaatactttgtagaatattgtccaaagtccattagggatattagcaagattttttttttaatcatgaattctgacttgctgtttatactatgtgtgttttttctttttctctgttcttttttgaagtaagctatttgagctaatgaatgtaattgagtaagaaagaatacagatgaaaagtcagggaacactgaacacttttatgtctgcaagtttaaaggtggtgctttagctgggtgtggtggcatgtgcctgtgatcccacctactcaggaggttgagtcaggaggattgcttgagcctaggagtttttaattttttttttaattttactttaagttctgggatacatgtgttgaatgtgcaggtttgttacataggtatatatgtgctatggtagtttgctgcatctatcaacccatcatctaggttttaagcctcgcatgcattaggtatttttcctaatgctttccctccccttgccccccatcccctgacaggccacagtgtgtgatgttccactccctgtgcccatgtgttctcattgttcaactcccacttatgagtgagaacatgcattttctgttcctgtgttagtttgctgaggatgatggtttccagcttcatccatgtctctgcaaaggacattaacccgttatagtattccatggtgtatatgtgccatattttctttatccagtctatcattgatgggcatttgggttggttccaagtctttgctattgtaagtagtgctgcaataaacatacgtgtgcatgtgtctttacagtagaatgatttataaccctttgggtatatacccagtaacgggattgctgggtcaaatggtatttctggttctagatccttgaggaattgccataccgtcttccacaatgattgaactagtttacactcctaccaatagtgtaaaagcgttcctatttctccacatccccaccagcatctgttctttccagactttttaatgatcaccattctaactggcgtgagatggtatctcattgtggttttgatttgcatttctctggtgaccagtgatgatgagcattttttcatatgtttgttggctgcataaatgtcttcttttgagaaatgtctgttcatatcctttgcccactttttgatggggttgcttgtttttctgttgtaaatttgtttaagttccctgtagattctggatattagccctttgtcagatagatagattacaaacattgtctcccattctgtaggttgcctgtttactctgatgatagtttcttttgctgagcagaagctctttagtttaattagatcccatttgtcaattttggtttttgttgcaattgtttttggtgttttagtcatgaagtctttgcccatgcttatgtcctgaatggtattgcataggttttcttctagggtttttatggttttaggttttacatttaagtctttaatccatcttgagttaatttttgtataaggtataaggaaggggtccagtttctgttttctgcatatggcttgccggttttcccatcaccatttattaaacaggaaatcctttccccattgcttttctgagcccaggaatttgaggctgtagtatacactgattagacctatgaataatcactgctctccagcctgggcaacaagacagaccctgtccctaaaaaataaaaataaataaataaataaaagtggtgttttaataatttcagacggcaaaatatccaactggatgaaagttaatgaaactctcctggtggaacatcactagagcacataaataagtgacagctgtgaaaagtttggtttcaacagtaggctgggcattaggactctattggggttgttcattttaagttgtcacattgttttgaggggaggggtgggagagggggagctgttttggtttttagatattcatgggtcaattacgtgccaggctctgtgtgacatgtctttcagtccaccctaacagtgaacttacgtcttcctccttgtcctctaatatgaaaaagcagaacaagtgtgtctgcatcacataagacttttttaaaaagatggtttaggagagcaacgacccttatattttgctctcttttatctttagaaattgcctgtgttctacctgtactgatggatggcatacagagtcacccccaaaaacctttctacacagttggtgagaaggtgactgtttcctgttcaggtggcatgtccttagaaggtccttcagcatttctctgtggctccagccttaagtggagtcctgagatgaagaatgcccgctgtgtacaaaaaggtgagtggcttccatgtctatccaaggacacttgtacccaggcaagtgagagtccttgtggcgaccttcatggtactgtatcaccatagctgtgagtcattccctccattcttgctccttaagatagggtcagtttgtagactgagtaacagattttcttcacatggcacagaaagactcatgaaagcaaggaaaggcaaggatagcctggtgattctgaaacttttaacttaaatcatccttgtgaaagattagctttatatctgttatggtgccaagacaataaaggatttttaaaatctgttttttgtttgtttgtttgtttcctctagatttttttcccctgcatttttcataagtacagagttgagatcataatttatttaaagttctgtatgtttcatttttgggctttcaaagagtttatcagtatttctgaaattgaaaatttagaaagcattttcatttaacactttaaagcagacattattgaaggaaaagtgttgtgattcatgaaattgttcttaatgtggaaacccaaaaatccagtattttaacaccaagaaaattaaaatggtcttttaagaacctaaggtagaaaggatttagaaagccaaattatttctttttagaggtaattttagatgagatagatttgtttgacaataaccccttatttattctttgtttacattttttaaataaatggaaaatattgtatttgtaacaaaaatgagaatgaagaaaaactcacttgcatactattttatgtgatattatctctctagtatgtgatttttaattaaacgctgaaatttatttttaatagtgaggatgaagtactagatttcacaggtgatggtgtgaggtgaattagatgtttctaactaagttctccatgcgacagggtatggagcactcagatactgatggtagatatgggctgtgatgtgaagtggatgagaggcagaacaataggcaagacacacgtccttggagtgccctccctgcctgtcctgatgtgctgttaagttatcaaagctccatctcagaggacagttgttttgtgttctgtaaacactgaagtataaacatgagtttacttggaatatttaaagtcatggaccagtacttacaattctaaaaatgaaagagaacaatatacagttgatgaggttgcacttttggttcaaatgagattgtagactagtctgtctaaaatgctacttcagctattttacagcacagtttggtatgaagtttcatttacccagtagaaaattctattaaagtgggttttaattaaggatgtttttcagatctgtgtgtttttctgaagatgtgaataacagtaactacttctaagcctataacaaacaaaaaaatccaagacttaccagcttccaaagttgatgttttaaaatgttggctgttctagtatttagtctttttttttattataataaagcatacataacataacatttaccattttatccatttttaaatgtatgttcagtggcattaagtaattcccattgttgtgcaaccatcaccacattttttttcatctttccaaactgaagctctatatccattaaacattaattcctcactttcccctactgtccccgtagttagtcttgatgggaataaatttgcttttaaaatagcaaaagcacatactttcggtgggccttaagagtgtgtttacttggttaaccaagctgtaaaggcaacaaagctatgttcttcttaaatgcaaaaattctttgggctaggtaattctatcgtttttttttttttccacaaagacattataatacattttttttttttgagatgcagtctcgttctgtcacccaggctggagtgcagcggcacaatctcagctcactgcaagttctgcctcccgggttcacaccattctcctgcctcagcctcctgagtagctgggactacaggtgctcgccaccatgcccggctaatttttttttgtatttttagcagagacggggtttcaccatgttagtcaggatggtcccgatctcctgacctcatgatccgcccgcctcggcctcccaaagtactgggattacaggcgtgagccactgcgcccggcttgacattataatagtttaagcaaacttttaaaatctaaaatttcaggatttgtcctaaagtaaatttttaaccacagtgcagaactaatttacatggcttgatcattgaccttaagttttggtacatctagattaaggcttctcaacctcaacgctattggaattttaggtctaataattctttgctatgggagcctcttctgtgcattgcagggtgcttagcagcatccctggtctctacccaacagtagcatcctcctatgtcaataacattctgcagttgtaaaaaccaaagatgtccctagtgatttccagatgtcccctgggggacaaaactgcccctggttgagaagcactgatgtagataataccatttttaaaaaatttcattttggaataattttagatttcagcaaagtcacagatataatttctacacacccttcacccatcttccttaatattaacatcttacataacacaacttggttaaaactaaaaaattaatattagtacaatgctattgactaaactatacactttattcaaatacctcatgttttaccactaatgtctcttttatgttctagggtccagttcagggtactacgttgcatttaggataataccattttaaagagaagtgtgctttttttttttttttgagacaaggtctcgcttgtccaggctggctggagtgcaacggcgcaatcttggttcactgcaacctccaccacccgggctcaagcaattctcctgcctcagcctcctgaggagctgagattacaggcatgtgccaccatgcccggctaatttttgtatttttagtagagacagggtttcaccatgttggctaggctggtcgtgaactcctgacctcaagtgatctgcctgcctcggcctcccaaagtgctgagattacgggcgtgagccaccgcgcccagccaagagaagtgttttaataatgaatcttgttattgagactgctgaccatggcaggcatacttcacattgccatcatttttacaggtttatgaatgctcacaagattgtaatgtcatgtccaaggctcttgaattttccaaagtaaggaagtatttcatagtttgtgtattcataaaaacatattctccagataaactacctttatagatatagtaaatgactatctagttttatgatgcaaaagtgtatggcaatgaatttcattgtaataaagctattacgaggtgaaaaaagtcaggatgtttttagatcattcccattgcaatcagggatagctgaggggatggcagtcacattatgctcttgtaagttggaccacggtgtttacctgtcaaaactgaaatgatgactgaattgtcagtttctataaaacacaaagttatagaaagaattttattaacgtaatgacctccagacatttattcactgttgagggagaccacttagacattcatatgtaagaggttattgtagatcttctcggcacaccagggagttctccatgtataaggcaagtgatgttgctgctttttgcctcattatgggcacagcaggcagaatgcagtccaaacaacaaacagtttataagcaccagcttcttgaaagggagccactttattgtccttggattcagaccaatgtagaattaaatgctgcctgggccagtttgttaaatgtgtgaagtagcaccaacttcctaactctttttactcttaattttctgatttcttaggtgggcatgtgttagggaggcatgaatatcccaatgtataaaaagtgcatgacaaatataaatgttcacgagatggtagctattactaccaatgcagttatttgtaatgtgactctagaaactctctatagcttgtaaaatgtatcacaccttgattattattactattgttactgtgcaaatgcattgcagttggagaatactacagaccctggtccagcaattcatataataccttgtttactatgaagaggcttttctcctaacgaccacatctcccttatccttttttagaaaatccgttaacacaggcagtgcctaaatgtcagcgctgggagaaactgcagaattcaagatgtgtttgtaaaatgccctacgaatgtgggtaagtgccgcctttgctcatttctctgttttattttattaatgataagggataatttcttagataatagtgtctgttggatggaaggtgtagcttaccaagagttaagggtctttgtttgcatttcgatgtagtccatctgctgcctgttatttgtctgggtcactagggctgacagccatggcattaagcagtgttctaatctggctagtggagaaggctgcaggactactcgagcactgcttgttttatatataaaatggagcaaaatggcaaaactgtcagctgaggatttagaactttagaggattagaggattaaaactgaaattcctttggcacataaactcttaaagcaatactgatagggaaacagcagctgcttttgttgattcttgaagcatcttctctagatttgcatggttaagaatgccaccaacttgaaatcattccattgtaggaggatatctctgaagtagttaatagatgtctgtgtcatggtcctagtaggatagagatggcacaattaaattaggacaagaaaagctttattagcagaaatatttacaaaaatgtgaacagaggaaaggaaactacaagtcccatggcagtattcctagactgctaacagcttgaccgtatagccatacccaggtccaaggagtaaggagaggggcattcaggaaaaactggagacagagagggctgtgtggagatggccctgaggaggagctgacactctcattttagggacttcagaggtcccacaggcgtgagccaggggcataaacacctcaactgcactgtccttcctgcctcgagtctcctgctagtcagtgctcaccactgatcaaaccaactgaagctagaggccgaggaagtccacgatgtggcccatacatgtcagcttcccaggcaggtggagaagagtggaaagtggatctggggaggaaataagaaatatccagcccctagacttagtggccatttttaaaattaaaaaccaacacatgacctggtgcggtggctcacgcctgcactcccagcactttgggaggccaaggtgggccaattgctcgagctcaggagttcaagaccagcctgggcaatatggtgaaaccccttctctacaaaaaatacaaaaattagctgggtgtggtgactcactcttgtagtcccagctactcaggagactgaggtgggaggattgcttgaagccagggaggttgaggcttcagtgagccacattcatgccaccgcactccagcttgggtgacagagccagaccctatctcaaaaagaaaaaaaaaaaaaaaaaaaagaaccaaaacactaattacttggttttcaatgattttggttatcaaaaccgatatccaacttcttgaagctacagtgggtaattgttattgtatatagcaatttctggtgtgaagaggaatataaataactaaatggcgtgatggaaatggtggtcagcctagatacattctcattctaatattctgactttgctgctaatctttaataattattgtttattttgagtcattttcatcctctttccaacttccccatttcatttagttgatctgcagctcgttgttaatagttatggtatacatttccatgtcattccatggtctcagatactggcaacaaggtggtattgtaaggtctttaccctttcagctgttataagtagttctatttaaagtttcaataaacagatgaaaagatagattcaaaacaacaggatttgtttctgttttataaataactccaagtaaatgtagcttttggtagaaaaggaaaatattagaactaaataaagtgtgtgaatatagactctttctgactccatctggtatacaaaaatgctgtgttgtctaaggtttcagtgacagtaatgccctccttgtctatcagcattcagaaatgtggagttttctgatagtgacatttctaaatagctatttttttccactattttagcaccaatgctaatgaggaaggtaacacattttatggaaattttttttttttttttttttttttgggacacagtttcattcagtcatccagactggaatgcagtagtgcaatcttggctcactgcaacctctgcctcctgggttcaagtgattctcatgcttcagcctcctgagtagctgggattacaggtgtgcgccaccacgcccagctaatttttatatgcttagtagagatggggtttcgccatgttagccatcctggtcttgaactcctgacctcaaatgatccacctgcgttggcctcccaaagcactgggattacaggctcccaaacttatggaaatatttctaaactattttgtaaacatagatacttttaaaagtagcattgaaaaatacagtttcatcttcccgtgatgatttagggtcatccatttttggacaatgcagttttatggacatgaactcttggctgttgggctgggatgagctcatttctcctgcaattaatggtcccatttgactatgatcacattgaatgcttggtctccactggctttctgtctcctttgtcagctgttgctagcagaccttttcttctcatctaatttgctgtacctggtctgttctagatagaactagatcaacactagatatctacacttagaaaaattgtgagcaaataatgagtaaatacaaatatcttcattttgaagacctaagtgagttggacctaggaatgaaggggatttgagtttccaccttttttttttttttactgtgggtgataacatctgggggcactaagctcagagcatcacttttcatttctccttctcagcttttacgaacaaaaatcttgtaaataatgtcattaaaaattcttttcagaccttccttggatgtatgtgctcaagatgagagaagcaaaaggatactgcctctgacagtttgcaagatgcatgttctccactgtcagggtagaaattacacccttactggtagggacagctgtactctgcctgcctcagctgagaaagcttgtggtgcctgcccactgtggggaaaatgtgatggtaaggggcctttcatatttgtaagtataagaatgctaaagtcacagtactgaggatttaaaaaatgtggtttctagtttagcagtgggccgaagaagatacttgaggatgttaaagactcagactgatttgacatgcactgacctctcctatacccctcactggagaagggcacagatcacagacctcagaggataagattcccacattcctgatgtggaaatgttctcccaaacaggggtgattccatgccaccttcatgatttttactctgtccttgtattatccatattgtgtactcattttttaaaagtctgacataaaaataacttaaaaatgaaaactttatatcatgtccttaaaaggaggtatcacttgccataaatactaggtaactataaaagttatatgtaatggaactaaataaagttgtggactctagccagatactggtccaacattgactatgctgtttctctgtgagtttagcaagtgttagaggggtgttaaaaacatactagcaccaagctgacactttcttctagaagtaatcagacggatttgaagagaataaaagaagaagttactttctcacgttgtgattcaatatttgctaacactatgtttaagtagtacttacagtgatcttgaactcccccaagagcacagcaaacctcccatgatttgggcagtactatgaaagtggaatggctgggtctccagagccaagtcactgtctgggcttccctatctgtaaatttaggagctggactctatgacttgtaaggtctctgtcgtctcttcactctctgccctcctggcctgtacccgctggcacctgtcccctcactccctcaaggtttgcagcacagactgatgacatacatatgtgactctagccatgtctgggtcacttttggttaggtggtcaccattgtctgctggctgaccttgttactcatctttggaagactcctggctggtgtattccaaccatggactttccatgcacagactccttgcctccttaactcatttctggtttgttttttgggatttgtagccttttgcatgccatgctctctctcaaagcaagttaagttctctttttttctctctctctttgtttgagtcttgacttggttctttgttgagggcttctcatttgacctcagttgctggcttatatggacagcagcatgtatgtaggagatagttgaagagctcttgacttggataaaaccaccccatgtggtctaaccaatataaagcctgctaccaacctcaaaacctatttctttggagtggagcaaaatgccccaatttcctggtcctactgcttttccaggggataatttattatgtcattccaggcaggagcttctacagctctgatcaccacattattactttggaggtgatgttctttgactccccgacctccacaatgtaccattaagcctctttcacttacttttccagctgagagcagcaaatgtgtctgccgagaagcatcggagtgcgaggaagaagggtttagcatttgtgtggaagtgaacggcaaggagcagacgatgtctgagtgtgaggcgggcgctctgagatgcagagggcagagcatctctgtcaccagcataaggccttgtgctgcggaaacccagtaggctcctggaggccctggtcagcttgcttggaatccagcaggcagctggggctgagtgaaaacatctgcacaactgggcactggacagcttttccttcttctccagtgtctaccttcctcctcaactcccagccatctgtataaacacaatcctttgttctcccaaatctgaatcgaattactcttttgcctcctttttaatgtcagtaaggatatgagcctttgcacaggctggctgcgtgttcttgaaataggtgttaccttctctgggccttggttttttaaaatctgtaaaattagaggattgcactagagaaacttgaatgctccattcaggcctatcattttattaagtatgattgacacagcccatgggccagaacacactctacaaaatgactaggataacagaaagaacgtgatctcctgattagagagggtggttttcctcaatggaaccaaatataaagaggacttgaacaaaaatgacagatacaaactatttctatcctgagtagtaatctcacacttcatcctatagagtcaaccaccacagataggaattccttattctttttttaatttttttaagacagagtctcactttgttgcccaggctggagcgcagtggggtgatctcatctccctgcaacctccgcctcctgggttcaagcgattcttgtgcctcagcttcccaagcagctgggattacaggtgcccgccaccacgcccagctaatttttgcatttttagtagagatggggtttcaccatgttggccacgctcgtctccaactcctgacctcaggtaatccgcctgccttggcctcccaaagtgctgggattacagacatgaaccaccacgcctggctggaatacttactcttgtcgggagattgaaccactaaaatgttagagcagaattcattatgctgtggtcacaggggtgtcttgtctgagaacaaatacaattcagtcttctctttggggttttagtatgtgtcaaacataggactggaagtttgcccctgttcttttttcttttgaaagaacatcagttcatgcctgaggcatgagtgactgtgcatttgagaatagttttccctattctgtggatacagtcccagagttttcagggagtacacaggtagattagtttgaagcattgaccttttatttattccttatttctctttcatcaaaacaaaacagcagctgtgggaggagaaatgagagggcttaaatgaaatttaaaataagctatattatacaaatactatctctgtattgttctgaccctggtaaatatatttcaaaacttcagatgacaaggattagaacactcattaaagatgctattcttc

SEQ ID NO: 107 - DNA, 154875 bp, Homo sapiens
agcgagagacagcaatgatcagagtgacagacatgcagagacagtggcagagacagagcgagagagcctgtgatggagagagacagggaatgcaattttaggcgaggaatccttggggaagggaagttgttgaagggaactcgcagactctgggggcacacccactttctccttggatcttgacacttgcatcttgtaaataacgtaattatcaccgccaccgccttcccccattttgtagctatggacaccaagtctcagagaagtgaagtgacttgcccaaggtcacgcagctggcgagtggcgcacaggggagggggacagctgaaataatcacagtgggcttatttttaatttttatttgtattttggtcgtggtgatgtgggtggaggtggagatggcaagttgggaaaagtaaaaacttccccttcctgcacggttcccagcaagggtgggggcctcctgtcttgcactttgcaaagttcaagaaatcccctttccctacccttcacgctgcacagccggccctctttccagacagtgcgatgccaataaaatgggaagtggggtgggagatgtcaagtcagatccaccacagccccgacacggggaggaagaggttaaagcctttgcggccggaaccgactcagggaagacgttctcaagcatcccgcacagacactgcctgctcgaccccctttctctagggatccggagcgtctgcgaccgcctggggccggggctgagactcccgtccctgtgcgcacctgttccgtgcgcccttgtgcggtgcgcacctgttccgtgcacccttgtcccgagcgccccagctccttgcgctcccgccgggggtgcgccctgcagggggcgcggcgagggggccgcgagggaccctccccaactccaccccttcggcctcctcccctttcccagccgcgggcagctccgggtctataaagagaggcgtccgaggacgcgcagggagatttggacgctccggcctgggaggtgcgtcagatccgagctcgccatccagtttcctctccactagtccccccagttggagatctgtaagtagtagttgtcattctgggggcagattgcagggcaggggggtgttaaaagtcctatagggtattctataggggctggggtgcacttaggggtccctgttgtcaacctcgtaagggccatggtgggggcagagttgtgatttggatctctctctgccttatcgtcttagattatcctagactttccccaaacagcatttcttaagattgccagtgagaagtaccattttgggggtgcttattaacgatatcaatgcctggacccaactccatttcccaactctagaatccccagaaaaactgccttaaaaaaaaaaaaattagtcccgagtgattcttgttaagaggctaatccaggagatatgctcccttggaaatctcagaggtccggtgcagacaatcaaggcatctcacttttattctaggcaccaaaaaatttacagctgaacttcactgaaaagtcacttgctatcacacagaagggcaaagtgaggctccttgtggatttgaccgtattgcacagttgtgttgataatgcattaaatcagttaaaaacacatgggcataggcttagcagaaaggagtgttgttgttttttttttttaatcagtttaggggaggttcttctatgttgagaacccctgggagataaggctggttgtgatctagtttgttacagcccactttttcctcttctccaaattaaaaaaaaaaaaaacaactcacccaggttgaccccaaagggcccccagatacccaggtgggctccaaagtctccatttgcttccacgatctgcaggtgcgttaggtaagattacactagaatttcccgcagagccacctgtgtcaatgccactctcgtgcccaaccaaatgggtaaaacgagagaaagtgtggctactgcctgttgtaagttttcttccagcacagggtctggtagggattttgccacttgagaaaaggtaccatccaaagccatgcttgtcaagaagtaaaagaaaatatttagaaacccaaggtgggagtgtttagttgcagtatgaagaactgagagattaaatggtgaactgtccgtccggggtttggcaaaaagaatgcaggctattaataaactgctttgcatagttttttgtttctttgatttactcaacgatactattttagaattgttcagagacggaacttgacgctgaactgaaagtcattaggtggcagggtgtgaaataagatagagaattttgtttgaaggaaattgatgttttccctttgagatagctaccgttgatggaacacttcagtgccacatgctgttgcaacatttaacttaatttatctcatttaatctttgcaacaacttcataagaaaggctttatgatgcctgtttagtatacaaggcagctgaggctcagagaggtaaagtgtcacacagccagcaagtggtagaacccattcccgggtcagtttgagtccaagttcatacccttgaccccactatctttcttctttaccatggacacaaacttgttggggtcaggtttctggtgggactaaatgcttccaacaaagtaaatgtttatcaccgtgtcctttgaagaaaacataaactgactttttgcacatttaaaataaaaggcactgtttgtcccctgattgagggggtgacctagctgaaaccagtgaccctaggtgggctgccatgccgagagtccagaacgtgaactagctgggtcttttccgagaagccgccaggcttgccttgtaaacaccatgtttttttattatcatgtccgaaatagatgtgttattccgtacaaggtatctgttatggatttgttatcattacttttccgtgggagggcagagattgaggcaaacatgcccatttatggaagcgttttccatgaggccatccccggccccctcgtcagttacccagccttgcaccgcagcccggttggtcctggccctggggatttgtctaccatgtccctcacccattgaagaactagtggagaaaccctaaggagaagagatttgggaggaaagtgggattcttttttcctaccccctcttattcagaggtttgatttttttgggtggggggtgggagggaattgtctcctttccacaggtcttgaatccaaacaggtgggtcttccacgttaggcacaagcgtgtaattccaagagcagatatatagtagatttttcttgaaaaccaagttcaatattcaatccagtagaatcatagaaggccataagcaaatttaaaaatcatctcccgcacctccccaaacctcactttctcatccgggaaatggggctaatgagaataactcatgttttttgggcacttttgcctggcgagatgctaaacgctttgtggacattatcttacgtcttcataacaaccctttagagtagatactgttattctaactggctttattttacacatatggagtctgaataacttgcttaagatagctcagctaaccagtaaggaaaagaagattctacaaatctaggtctttctaactccagagtttcacagattaccctcatgggaggatttgatgagctaatgtgtatgaagggtttagcacagtgcctggcccctggtaagcttcagtgatggttatttatagcaaacacaaccagagagttcaagatgtttgctcagtatggcatggctcatctttggcagaaccgggaagcctaaactatgtggccgttaaaggagaagcttctcttaattttcttccctttgatctcataaacctcgtttctatttgggctgaaagtggtgattagaatctttaatatattaagctaccattccttacctggattgggaatgttacaaattccaattacatttgtttagggttttgtttgtttgtttttgagacagagtcttgctctgtcgcccaggctggagtgcagtggtgcgatcttggctcactgcaacctccgcctcctaggttcaggcacttctccagcctcagcctcctgagtagagagtagctgggtttataggcgcccaccaccatgcctggctaattttttgtatttttagtagagatggggtttcaccatattggccaggctggtctcgaaccgctgacctcaagtgattcgcctggcttggtctcccaaagtgctcagattacaggcgtgagccaccgcgcctggcttatttagggtcttgatggcatactttaagggatggcctttttgctctctaggtcttctccttccactcctgacctttcaacttttaaccctggccacacaatggaggaaagactgaatttagagaaaggcaggcaagaatttgaaagaaaccttgtatgtgatccaaggacagaggaagaagctgctcacagtggctgaaaggggaggtcggacatctgtgacttgtatcagggtttcaggggctaaggaggaacaacctcatcaaagttgctaggaaagggccatagaggccaggtatggcaggtcatacctgtaatcccagcaatttgggaggctgaggtggggggatggcttgaagtcaggagtttgagaccagagtgggcaacatagcgaggcaccatctctacaaaaaaatttttaaaatgagctgggcatggtggcatgcatctgtagtcctagttattcaggaggttgagtgaggcaggaggattgcttgagcccaggagttcaaggctgccgtgggccctgattgcatcactgttctctagcctgggcaacagagtgagactctgtctcaaaaaaaaggtgaggggcatagaactttactgtaccaggctgaaaaatacaaggcccagagagggcaagtgacttgcctagcatcacccagcgagttttgggcagagctgagacttgtaactcgaagacctaaggatcttccacaggctaatgaatagcttgtttgtgctcaagggatgaagcagtgagttgttaggacaggactgtgaatagggctgacatattcagatgtgtcaaacatcgctaatgccatctctgagtaaattaggcttcaaacagatcgggattctaatcctggttccccaacttttgcaagggagggccttgcatttacctttcaagaccccgataggcttagcaggaaaatgggaataatagataatgccactctttcatccttggactttttgtctaattatatgaatttatctgtaggataaattcccagaaatgcgcttgctgagttaaagggcatgcgtatctaaaattaatagatattgcaaatgactggctaaagacattgcagaccaggtgcagtggctcacgcctgtaatcccagcactttgggaggccgcagcaggtgggtcacctgaggtcaggagttcaagaccagcctggccaacatggtctctgctaaaccctatctctactaaaaatacaaaaattatctgggcatggtcgtgggcacctgtaatcccagctactcgggaggctgaggcacgagaatcgcttgagcctcagaggcagaggttgcattgagccgagatcacaccactgcactccagcctgggcaaagagtgagactcggtctcaaaaaaaaaaaaaaaaaggcattgcaaattgcaacttgttgcagtcacatatgacagcagtccccatcctcttggcaccagagactggtttcgtggaagacaatattttccagggtggagtggggaggatggttttgggatgaaactgtcccacctcatcatcaggcattggttagattctcataaggaacgtacaacctagatcccttgcaggtggagttggcaatagggtttgtgcttctgtgaaaatctaatgctgcttatctgacaggaggcggagcttaggcagtgatggtcactcacccaccgtcccctcctgctatgtggcctggttcctaacaggccattgactgatactgcagcacaagggttggggacccctgacataggagactatacatttattttaagctgtggtatgccagaattgtaaaatataaaacacagtggggcttttagggccagaaataatcagttcttgctcgcttccagaagcatccttcacaggggctaccgtaactcttgccaaccaagttctcttggttgggaggaaaaaatagtgttatgcattaagagaacttctttctggagttacttgaaaccattggtattcagatgattaggcagatgtcacaaggcaataagaatgtgacaggttcaccattcactttttttcctgtaaaagtgaagtagggctttcttgggaacaagcccttgggaggtggggggatgtgaatggtgaggggagggtagaaatggtggagtagggtcaggggcaagaaagggactttctgctaagaattaatcgggtgtccatttactcttagcagaaaactaggattagattctggattgtactcctgactccaaattttacaagtgggggtcttgcatttaccttccaggacctcggtcatcttagcaggaaaatagcaatagcaggtgatgccaccttacagagcgcttaggagacagtgagatggtctatataggaagctgtctggcctgatacctgatgaatacaaggggcccaataaatacagtggctgttatgaataatagatctaaactgcctttttggtactactggggacctgccaagcaggtgcatttagagtgcccagtgcctctccctgcgacacatttgatgcctccctacacctggaccaggccttgagcgaggatttccactgcagaggtccttccagctggcgaattgtgttgcagatcaggttcagagaacttctgttttgcctgtgtggcattcattcattcgtttatttgaaatagagatgggatctcactgtgctgcccaggctagtctagagctcctaattcaagcaatcctcttggcttggcctcccatagttcttggattacaggtgtgaaccactgtatccagccctttatgacatttagaatatgagcaatttttcttttttcttttttttctttttgagatggagtctcactctgtcacccaggctagagtgcagtggcatgatcttggctcactgcaacctctacctcccaggctcaagcgatcttcccacctcagcctcccgagtagctgggactaccggcatgtgctgccatgcctggctaatttttgtattttctgtagagatggggtttcaccatgttgcgcaggctggtgtcaaactcctaagctcaagcgaactgcctgccttggcctcccagtgttgggattacagacgtgagccacagtgctgaaccctgcatggtatttagaatataagcaatactctaacatctggtctgggtcactctgtattacttacctgatctccaaaaacatttgggtttttgtctctggtccaaaatctttagccaatggcttggcagtaaaatcctgagggaagctgttgaccaggtgaggtgatgtgcaaatcctatactctctgggctctgggatatttaatttactatttatttatttattttcaagacagagttttgctcttgtcgcccaggctggagtgcagtgatgggatctcagctcactgcaccctccacctcctgggttcaagcgattctccttcctcagcctcctgagtagctggtattacaggcgcccaccaccacacctggctattttttgtatttttagtagagacggggtttcaccatgttggccaggctggtcttgaactactgacctcaggttatccgcctgcctcggcctcccgaagtactgggattacaggcatcagccaccatgcccggcctaatttactttttattaatgctgaagcagagagggcaagatcttttgcccctgagttcttctgggaaaaatgaaactgatggtaaaacaaactaaagcaacctgacattctcagttggtccagtttcagccctttgactgggagtcacagacgggtcccataaaatggtagagctgggccagcctaccattgatttattttccctaaatgaaaaatacaaggcccagagagggcaagtgacttgtccagagtcacccagcaggtttggggcaaagctgagactcgttacttgacatcctaaggtcttccagaggctaatgattagcttgtttgtgctcaaaaaatgaagcagcctgggcgcggtggctcatgcttgtaatcctagcactttgggaggctgaggcaggcagatcgcttgagctcaggagtttgagaccagcctgggccacaaagtgagacccctgtctctacaaaaaaatgcaagaattaaaaaattagctgggtgttctggtgcgtgcctgtgatcccagctacttgggaggctgaggtgggagaatggcttgagcctgggaggcagagtttgcagaaagcagagatcgcgccacttcactctagcctgggcaacagagccagaccctgtctcaaaaaaaaagaatgaagcagttgttggtcaggacaggactgtaaacaaggctgacacactcagatgtgtcaaacatcgctaatgccaaaggtgacagagtcatttgttttcatccaaacattcgagaaagttggacgaggtgactcacgcctgtcatcctagagctttgggaagccaaggcaggaggatcatttgagatcaggagtttgagaccagcctaggcaaaatagcaagacccccatctctacaaaaaataagccgggcatagtggcccacacctgaggtgggaggatcccttgagcccatgagtttgagcctgcagtaagctatgattgcaccactgcactccaccctgggcatatagtgagacccttcccccaaccaaaaacattgagagcagctcttgatgagtgaactgtacttcgtggtcagcagttctgggtagtaatttcagagatgtcctttcagcccttggagctgatgcaggaccttaaacatgagcgatggtggaggagggagggttgggaaggtgcatcaaggtagatgaagagtgtccctggggttgggccaactggcggtccgtctctggtccagtgtgttcaccttgcccccgtctgatcttctgcagttggtattccgagttgagtttgactaagtgagagctgctctcagctttaactgcctttcccaagacagcccttgtttttattctaaagctgtggttctcaactggaagcagttttgccaccccaggggacatctagcagtgtctggagacatttttgattgtcatgagtggaggaaggggtgctactggcatcaggtgggcagagaccagggatgctgcggaacatcccacaatgcacggaagagctcccctcacgacacagaatgacgcagcccaagagtcacagtgcagagtttgtggccagctgcggtggctcacgcctgtaatcccagcactttggggggccaaggtgggaggattgcttgaggcctggagttcaagaccagcctggccaatatggtgaaacctcatctctactaaaaatacaaaaattagccaggcatggtagcgcatgcctgtagtcccagctacttgggaggctgaggcacgagaatcacttgaacccagaaacgtggaggttgcagtgagctgagattgcgtcactgcactccagcctgggtaacagagcgagactctgtgtcaaaaaaaaaaaaaaaaaaaaaagacttagcaactattattactagtattagtattattaatttgtcaggctcactgaattttctcaaaaatttggcaaatttttaggaaaacattctcaaaacatttggcaaatctgtggctaaatgttgttttggggacccaaggctcgtaggagcaaaacagctttcaggtttccggatctgccagagactcaagtgtcctgttgtgtgttttgtgtctcaatgagggaaaggggaatatgtagcaccttccagatggatttgaccttgactgcgccactgtttgaagagcttctcaacctccgcagctccaccccagcccagatatttcagggaattagggttccaaggggcatgctatggaaaacaccattctagcatgagtcgaagcttctcatcccccatcttgctgtcttttgaccaaagcagattttgcacgtcgtaactgtcagagacatcaaagccagagggaatccagcctgctccaagctctccttttttgtacagagactgaatctttgcacttgatcttgtttgtgtttttaagtctgaggttagacagggtcccaggcaatggaggcgtgcgtgtccttttatttttctgttgtagcttttgctattttttctgacttttaaggcaactcatccacatggcaattaggaagagcccacttagggctgggcacagcggctcatgcctgtaatcccagcactttgggagaccgaggcaggcagatcacttgaggtcaggagttcaagacctcagcctggacaacatggtgaaaccccgtctctacaaagaatacaggaaaatagctgggcatggtggcaggtgcctgtggtcccaactatttgggaggctggggtgggaggatcacttgagcctgggaggcggaggttgccgtgagctgaggtcatgccactgcactccagcctgggcgacagagcaagaccctgtctcagaaaaaaaaaaaaaaaaaaaagaagtccactttacttgtcatagtgcttagaacaaatgaaacactctcctagccctcttgggatgtaattggctaccatctgcacaaactcttcattattgcacaagaatatcaatatacttaatgctactgaactgtgtttaagtggccgaggtggtgaatgttagctgtattttaccacaattaaagataagagggaaggaaaatgaagtgtactttacaaccaaaaaagtacgcttgatgtgcaaaaaagtgtgcagcttgatgaattttcaagaggatatattttttatagatgggggtctcactctgtcacccaggctgcagtgcagtggcatgatcatggctcactgcatccccgacctcctgagcttaagtgatcctcccacctcagcctcctgagtagctgggactgcaggtgcacactatcacaaccggttaatttttgtatgtttgctagagacaaggtttcaccatgttgaccaggccggtctcagcctcctgggctcaggttatcctcctacctcagtcttccacacaggtaattaaaaaacattttttcttagagatgggtcttgctgtgttggccaggctggtctcaaactcctgggctcaagtggtcctcccatcttggcttctcaaagtgctgggattacaggcgtgagccatgtcacctggcccaacagtttgatgaattttcagaaagtgaacactcatagggctggcattcagatgaagatctagaggtcaaccctcacaagcccccctcacgttctgtccttgcaatcattgcacaccggagactcattcattccttatctgagttctatcaccgtagattaattctgcctggttttggacctcagttcaatagtcacagaacctgtgctttttgtgaccaccttcttttgctcaaggatgtgttgtgagatgtccttttttgtggtgtggagctgtagtttacttcacctgattcgagtcctattttgggtgtttgtaatgtgtcaggtactgtgccaggtgccttacaggattgattcctttatgggcatctgacaagcccacccaccttatgtgaaaggcagaaccaaatagactccagaatgagacccaggtttgggtcccagctctgacacttctttttttttgagatggaggctgactctgtcgccaaggctggagtgtagtggtatgatgtcggcttacggcaacctccacctcccgggttcaagtgattctcctgactcagcctcccaagtagctggggctacaggcacgtaccaccaatcctggctaatttttaatttttgtatttttagtagagacagggtttcacaatgttggccaagctggtctcaaactcctgacctcaagttatcctcccacctcagcctcccaaagttctgggattataggcatgagccatcacactcggcctacttgtgatcaatcttacttcatcttcacaccctcccatttctcttacgcatcctccagtttctctctctctctctccttctttttctctctctctctctcacacacacacacacgatctgctgcgacaccttaagaaacaagagattatcagggaatgattgaatattttgccgcatttcctattttgctgcctgtttaaactaaccttggttatactattaaaagaagacgcgtcgtatcaagccacttctgtgactatggctgtccagaaataaacataattaaaacatccaacagtagtaaatgctattggttaggaatgagcgaagtggcttagagtcaccggaagtgagaaagggtatagaaacagaaggtacttggtgtagatcaggggtgtcctatcttttggcttccctgggccaccccagaaaaagaagaattgtcttgggccacacgtaaaatacactagcactaatgatagctgatgagctaaaaaaaaaaaaaaaaatcgcgaaaaaatatcatactgttttaagaaagtttatgaatttgtatcgggccacattcaaagccgtcctgggccccatgcagcctgtgggctgcaggttagacaagcttggtgtagagagtttcatctaaacttcatggcagctctgcagggcacccgttaggtccccagtattaatatacagtaaatctgagtctcagatctacgtaagtcacccagaagcacgcattctgcagtggcagagtcacgtttgaattagcatctgattgcaaagtctgggtgtctttacatgactacaggttatcttacctctcaagaggaggcaaccaatcaaatgttgccagcaccaatgaacttgtactttatttaggctcagaaagatcttttaggctaatgaaaatgccctatatttatgaaatgttctcgttctctgtggctttctcttttttgagacagggtctcaccctgacacccaggctggagtgcagtgatgtaatcatagctcactgcagcctcaaactcctgggctcaagcaaccctcctgcctcagcctcctagtagctgggactacaagcacgcatcatcatgcctggctgatattttttttaagggatggggtcttgctataatgcccagtctggtctcgaactcctgggctcaagcaatcctcctgccttggcctcccaaaatatgggattatacatgtgggctactgccagcctcttttctttcaattattttttaatctatgggttcccctcctttttgtttgtattttatttgttaaagaaagagagtactggccgagcgtggtggctcacacctgtaatgtcagcactttgagaggccaaggccggtagatcacctgaggtcaggagtttgagaccagcctggacaatatggtgaaaccccgtctctactaaaaatacaaaaatcagccaggcgtggtggcatgcacctgtaatcctagctcctcgggaggctgaggcaggagaatcacttgaacctaggaggtggaggttgcagtgagccaagatcccgccattgcactctagctgggcgacagagcatagtctctcacctttgggagtttactgcattgtttagcatgctctcctgtgccttgcattttccatagacaggcgtcagatctggaggcttcatcaccttcatcccccatctccatccccttttcttttgagcaagaatatgtcattagtggtaacggcacttcctgtagtggcccatctgcaggcatgtaatgtttataatgtctagtcagctctctctttttgtgatgttagggttaattagtagatttaggtgatggcaggcggacccatcccttaaaaattccacaagagctcttcatctgatatagtcagtcttgtggtggggaccctagaccagcatcatcatcatcacccggaagctggttaggaatgcatattcttgggccccatcccagtcctactgactcagaagctaatgcaccaggaaatgtgagccccattggcctaatggttttagcaattactggtagaacttgccaacttgccaagaccctttctttcttcctttctttctttttttttttttgagacggagtctcactctgtcgtccaggctggagtgcagcggcgcatctccactcacccactcactgcaagctccgcctcccaggttcacaccattctcctgcctcagcctccagagtagctgggactacacgcggccgccaccacgcccggctaatttttttttttttttttagtagagacagggttttgccgtgttagccaggatggtctcgatctcttgacttcgtgatctgcccgcctcagcctcccaaagtgctgggattacaggtgtgagccactgtgcccggcctcttccttcctttcttctttctttccttccttccttccttggcaaagtcttgctctgttgtccaggctggagtacagtggcatgatctcggctcattgcaacctccacctttggagttcaagtaattctcctgcctcagcctcctgagtagctggaattacaggcacatgccactatgcccagctaatttttgtattttttagtagagacagggttttcccatgttgaccaggctggcctcaaactcttgacctcaggtggtccgcccacctgggcctctcaaagtgctgggattacaggtgtgaaccaccgtgcccagcttgagacccactattagctttataaacagttacatcctagttttattgttctgcatgtattcgctggaattcttccatgtagaagggagtcttttttaagatagggtaactggagtcaggggcaggacactgttggtcttactatgagctaagccaaattcaataacaattttaaaatgcagaaaggaggattgttaaacttaggacaatacatgttgtctaccagatctttatttctctttctggatatctgaagtgattattcagatttagatgggatttcctcatttctctgcccttttttttttttttttttttttttttttggatgaagtcttgctctgttgcctgggccagagtgcagtggcaccatctcagctcactgcaacctctgcttcctgggttcaagcaattctcgtgcctcagcctcccgagtagctaggattacaggtgcctgccaccaagcccagctaatatttttgtgtttttagtagagatcaggtttcgccacgttggccagctggtcttgaactccggacctcaagcaatcctcctacctcagccccaacaaagtgctaggattacaggtgtgagccaccgcacctagccgccacttttttttcatcagctacgatatcaggtctcccagcagaaaatctctgagcaaatcaacttccaggtttgtttttcgtttttttgagactgagtttcgctcttactgcccaggctggagtgcggtgagaggcacaatcttggctcactgcaacctccacctcccgggttcaagtgattctcctgcctcagcctcccgagtagctgggattgtaggcgcatgctaccacgcccagcaacttttcgtatttttagtagagatggggtttcacatgttggccaggctggtctcgaactcctgacctcaggtgttccaccggccttggcctcccaaagtgctgggattacaggcatgagccactgcacccagcagcaggttcttaaaattagttttttaattattattttcagccctgaaaggaaaaaaataggtattggaatatctgccactcccattctgtcttgcaaaatctgcatcacccaaaaggttgggtttcaggagttggctgctcagctctagggatccaggagtgggacatgggtctttattctgtcgctgtgggatttggggcccaagcgtggggattatcagtgaattcaaaggagttgtgaattccctgctgaaggagggatgtcaaccacgcatagatcctggtggccatatgtcctcacttagccagcaactcagttctttggagcccagcagcaagaggtagaaggggctgtaagccagtgtttccaggacagcccctgcagctatggtcagagagtcaggaacggggggccggacaggcctatagagtgtgttgtctctgtccctctcctcataaacacatctggataacgacagataacgtgaatctaccatccatgggcttcccatgtagacaggacatttaatgacctaatcttccatcaagagagacttccccttcttaatttagttaccctaaggaacaatttgtatagaaaacgcagaatcaagattttcacatttccaccccactttctgtacccatttaaaaaataatgcatttggggctgggcacagtggctcatgcctgtaatcccttcactttgagagcccgaggctggtggatcacttgaggtcaggagtttgagaccagcctggccaacttggcgaagccccgtctctactaaaaatacaaaaattagctgggtgtgatggtgcacgcctgtaatcctagttactcgggaagctaaggcaggagaatcgcttgaacccagaggcagaggttgcagtgagccaagattgcaccactgccctccagcatagacaacagagcaagactccatctcaaacaacaacaacaaaaatcattttgaacaaatgcatttaaatatatttgtctttccaccctttttggggtgttagggtgatggacatataattatttttcttattgatattcacactgtctcgtatttgaccagatagaaccctagtataatattttggtatgcagttttctagacttttagaaatgtacacacaaacatataaaatgaagacaaatactttatgacaaatattttaatcagctttattgaggtataatctatataaagtaaaactcaccgatttaaaacaaattcaagtttttttaagtgtacagcttgagtgagttttttcaacttaaaaaatttatttcttaattgacaaataatcatacatgttcatggggtccataatgatttttttagttgtttggttggatggttttgagacagggtctcgctctgtggcccaggctggagtgcagtggcatgattacaactcactgcagccttgacctcctgggctctagccatcttcccgtcttagcctcctgagtagctggaaccgtaggcatgcaccaccgtgccaggctaatttttaatttttttacagagacaggggcttcttatgttgcccaggttggtcttgaactcctggcctcaagggatcctcctgtctcagcttcccacagtgctgggattacaggtgtgagccactgagtccagctcttagtaatgttttgatattaatacatataatgtgtggggagataagatcaggataattagcatatccatcatctcaagcatttgccattacttttattttgctacttcctatataatgacatttatcatctctttgtgttgggaacattcaatgtccttcttctagctcttggaaacgatgtaatattttattgttcactttactcatcctatagtggatagaacattcttaatgagttttgacaaatgtatacagtcttgtaagcaccaccatgaccacagggaatacttttatcaccccgaaaggtggtgcctcttacctcttatgtacctcttctgtgcctcttactaatccattcctttccttgccactggcaactcttttttttaatttttttgagacagcgtctcactctgtcactcaggctggagtgcaatggtgcagtctcggctcactgcagcctctgcctcccaggttcaagtgattctcctgcctcagctttttgagtaactgggattacaggtgtgcaccaccatgcccggctaatttttgtatttttagtagagatggggttttaccacattgggcaggctggtttcaaactcctgacctcaagtgatcccccctgccttggcctcccaaagtgctgggattacaggtgtgagccaccgtgcatggcctcctctggcaactcttgattgcctgtcaccatagatatgccttttctattttgccattactttttttttttttcgagacagagtctcgctctgtcgccgaggctggagtgcagtggcgcgatctcagctcactgcaacctccgcctcctgggttcaagcaatcctcttgcctcagcctcctgagtagctgggactacaggtgtgtgccaccacactccattaatatttgtatttttagtagagacaggggtctcaccatgttgcccaggctggtcttgaactcctgacctcaggtgatccactcacctcagcctcccaaggtgctgagattacaggcgtgagccaccgcgcccggccgccattaccttctatctcaataaccacacttacgtttgcaccagcctaatagtttttcgtattgaaggagtaatagagcgtgtggcctttctgatttgtttcactgagcatgatgcttttgagactcatttattttattgcataatttctttccttttactgagtttccagttatataccttgggttgtttgtttgtttttaaggcagagtctcactctgtcacccaggctggagtgcagtggcttgatcttggctcactgcaatcttgacctcccaggctcaggtgattctcccacctcagcctcccaagtagctgagactacaggtgtgcgctaccatgcctggctaattttttgtattttttgtagagacaaggttttgccatgttgcttaggctggtctccaactcctgggctcaaggaatctgggtaattctatgtttaatcgtatgaggactcttattttgcagcgcacagttagacttgaccatcttcccatattagcacgtgtacacttacttccggcttcttcttctttttttttttttttttttgagatggagtctggctctgtcacccaggctggagtgcagtggcactatcttggctcactgcaacctctgcctcctgggtttgagcaattctgcctgagcctcccaagtggctgggattacaggtgcacaccatcacacctggctaatttttgtattttcagtagagacggggtttcaccatgttggccaggctggtcttgaactcctggcctcaagtgatttgcccacctcggcctcccacagtgttgggtttacaggtgtgagccaccttgtccagccctacttcctgcctcctgagcactgggtagtatttcacagtgtggaaatagcatggcttatgtatccagctgtatgttggtggacatttgggttgtctgacttttggtattttaggcgatgacacacatccctttctgaagggcctttgggtggtctctgttctttgaccacatacacaatactgcaggtctttgtacttggtgggatgtctctgcagaccgagttcctagacagggcaaggtgagtggttggtctgtcttccgggcttggttgtggtctgattctgaccctgttaccttattccacaggggaccaacaaggcaccatggcgcagaagggccaactcagtgacgatgagaagttcctctttgtggacaaaaacttcatcaacagcccagtggcccaggctgactgggccgccaagagactcgtctgggtcccctcggagaagcagggcttcgaggcagccagcattaaggaggagaagggggatgaggtggttgtggagctggtggagaatggcaagaaggtcacggttgggaaagatgacatccagaagatgaacccacccaagttctccaaggtggaggacatggcggagctgacgtgcctcaacgaagcctccgtgctacacaacctgagggagcggtacttctcagggctaatatatgtgagtattgcaggcagccaggtacctactcctggcctcataaggaaagtaggcattagaaatgtgttgggagggctgggcacagtggctcatgcctgtactcccagcactttgggaggccgaggtgggcagatcacctgaggtcagaagttcgagaccacgctggccaacatgatgaaatgccgtctctactaaaaatacaaaaagtagccaagggtggtggtgcgcatctgtaatcccagctactggggaggctggggcagaggaattgcttgaatccaggaggtggaggtgcagtgagccaagactgtaccactgcactccagcctgggtgacagaataagactctgtctcaaaaaaaaaaaaaaaggaaatgggaggctgaaggtttgatcgagggagattgcaagatgaggtggaatcattccaaggtgggttcacatctcagcccttgaagaggttatttcctctctcgaagccttggttttcctatccgtaaaatgggaataatcaccctcattacagacaggaggtgtgacaatcccatgtcatcacatgtgccaagtgccaagacgtatgataaactctcaacagatttcattggcatcgttctctgtccttccttcctcttgaaagtaaagaagagctcataaccactttggaaaggctggtttgtcttggcagccaggtgggtaggagacatgaggatgtggctaggttttagggaggccttccttgtcacagaggggaatgttcaggttggtcgtaggactattttaggtagacttgcagaacagagtggactagagatggcacaatatggtagccactggccactcgtggctaactaaatttagatttaaattaattaaaagaaacattagaccaggtttggcgactcatgcctgtaatcccagcacgctgggaggccaaggcgggtagatcacttgaggtcaggagtttgagaccagcctggccaacgtgatgaaaccctgtctctactaaaaatgccaaaattagccaggcatggtagtgcacatctgtaatcccagctacttgagaggctgaggcaggagaattgcttgaacccgggaggcagaggttgcagtgagccgagatggtgccgttgcactccagcctgggcaataagagcgaaactccatctcaaaaaaaaaaaaaaaaaaaaaagaaacattaaaaaatttattagctgggtgcgtgggctcacacctgtaatcccagcactttgggaggccaaggtgggtggatcacctgaggtcaggagttctagacaagcctggccaacatggtaaaaccccgtctctactaaaaatacaaaaattagctgggcatgatggtgtgcgcctgtaatcccagctacttgggaggccgaggcaggagaatcgcttgaacctgggagatggaggttgcagtgagccaaaatcgcgttattgtactccagcttgggcaataagagcaaaacttcatctctaaataaatacataagtaaaagacaataaaaaataacaaatttatttcttttgttgtgttggccctaggtcaagtagtcaatagccacctgtggctagtggctggtgtactgggtagcataagtgcagaatgttcccattatcatagaaagttctgttggactgcttggactagatgattggggcttggagtgtgatgttgtggggcacgggtcgccagactgatgtgcagaggtcacccaacccggcctatgtctatgtcttctctctgaaaggccttgctcaccctcgagcaggttacctcatgcctctgaagctttgtttccttttctgtaaaatggatgcaagaatagtgccagcctcttgggagccgggcatagtggctcatgcctgtaatcccagcactttgagaaactgaggcaggtggctcacttgagcccaggagtttgagaccagcctgggcaacacaacgagaccccatctctgcaaaaataaattagccaggtgcagtggtgcgtactcataatcccagctactcagggaggctgaggcaggaggatcacttgagcccaggagttcaaggctgcagtgagctatgattgtgccactgcactctagcctgggtgacagagcaagaccttgtctgtttcaaaaaaaaaaaaaaaaaaaaatagtaccagcttcatggagtgggttactctaaatagaaagcacttaatacacttcctgctacatgttaagtgcaggcactgaaaatgttaagtgttactagattggtttttgctgtggtcatgatcacttttgattttactagtaagatgttcttcttccatcacttggcatccttgtgtctctttggttctggtctgtacattttgccaaatgaaaattacaaaaagccccttgtcatctctaaaaatgtcctgcacatttttttcctaattaggaaactaagacacgttcactatggaacacttggagagttcagaaagcatagtgaacacaaaacagaaaaattagtccttaaccagagatgcggtgcattctttgtctctttgtgagcatggtatctgtttacatatttaaaagcctattgggcacacagtttagtgacttgctcttttttccatttggaaatgctcagtgttgacttgtgtaatatatctcaggaagccccaaagataccccttgtaaggggtagtatagaatctgtcatggggataggccatttttccactgttcttatagatatttcagaaggagttagagtggctttttaaagagccaaatggtaagagtgagcaacttagcaactcataacttttttttttttttttgagatgggggcttactctgtctttgaggctggagtgcagtggttctatcgtagctcagtacagcttccaagtcctggattcaaacgatcctctcacctcagcctcctgagtagctgtggaccacaggtgtgcaccaccacacctggctaattaaaaaaaaaaaaaaaaacttctgtagagactgggatctcactatattgcccaggctggtctcaaactcctggcctcaagccatctcctgccttgacttttcacggcgctgggattacgggtgtgagccactgtgcctggccgtaactattaaatatgtcctccaatccaagtgctgtacattgacacattgtattttatttaacacagcatcccctgagttaaaaatgtttgccccttttagggaaggaagctgaggtgcagtgttgcaaaatgtatctttactttcttaagtaggggaagtctcttgtctgtggcactgtttgtatggaaaaattattgatctggggctgtttgtatggtggacattttctttttctttctttcttcttttttttttttttgagatggaatttcacttttgttgctcaggctggagtgaagtggagcgatcttggctcattgcaacctccacctcccgggttgaagtgattctcctgcttcagcctcccgagtagctgggattgcagggatgtgccaccatgcctggctgatttttgtatttttagtagagacgggtttcaccatgttggctaggctggtctccaactcctgacctcaggtgatccacttgcctcggcctcccaaagtgctaggatcacaggcctgaaccaccacgcccagccagtatgttggatatttctaaagaggcccgtctgtagggagctagagggaaaattggactctttggggcccaggtctttcatctaagacgtatcatcaccatctagggagtttcaggacaggcctgtgtattcatctcacctgctgtcctcaaatagaaatcagaaaaaaaaagggcatatgaaggtcctgagacccaaaatatcttctgacagcagattaaaaataaatgaatcaaagcttcaaattcctgctatgcttctctggacagattagattaaaatcctttcagccttgtgatgatggtcccgctcttctcttgttcctttctggtcagtttaattgcttaatagaaaccgtcgtccatgacggagaagataaagaaggaaaggggttggggtgggggagcacagtaacttactctcccagcccataatagcagcatgcatgagtcttgttaataggcgggtagtgaggtgataccaggtccgtggtctggcatgcatgactttgccctctgtgatgaagataaactttctcctccgttctgcaaggctcgcctcaaacgatgtgcccttgagaaggttctggcagacctcttgtgctcttggatctagaagagtctatagaagccagaggagctttcctcctaatcttagagatgcaggttctgggctcagcaatgtccagcagtctacctaaactgctgaagaccgtttgtggcatacctggcggggagcatggctttgacgcctggtcctaagggtcccttggtcttctgaatgctgtcttttggctgagttcgtctgcctcgagttagttagttcgttcctcccttccttccttccttccttccttcctccctccctccctccctctctctttcttcctttctttctctgtctttctgtcttcttttttctttcttcttttttctttttctttcttttgagatggggtcttactctgttgcccaggctggagtacagtggcatgatctcagctcactgcaacctctgcctcctggaactcaagggatcctatctcagtctccttagtagctgggactacaggcatgtagcacgatgcccagctaatttttttgtgtttttggtagaggtggggtcacaccgtattgcccaaacagatctcgaactcctgagctcaagcaatcttcaccacttcggcctcccaaagtgttaggattacaggcatgatattgtgccactgcactccagcctgggtgacagagtgagactacatctcaaaaaaaaaaaaaaaaaaaaaaaaaaaaaaaaaaaaagatgaggttgctgaagctcagatgtgcttagtcccaccactggaaggtgggcagagctgggattcagacaaggtctgtgtgagtccagggccagggtgactacctatgattagtagcaaagggctcttggggtaataggcttagagcaggaggtgatggtcgtgggctggagcaggaggggacagtgccagaggccttgttagctttgaggtagacaagctttaagtgcagagcaagaaggaattgaaccttttattatgattccttgagcacctaactaggtgctagactaatgattacaacctgctaacacagaggagtgatttttgtttttaaattgagttaacttaatatatcaaaaaaagaaatctgtttctggcattgctcgaaaaagcagaggacctgacactgcagaatgcagagtgcgagtagcagtccctgtgagatgggctttttgctctgcttttccgcagacctcaccactccctgtcgtctcccaggccatggtaaccattgaccgtggcacctcttttgttcactcacacacgccctgcttcactcatgccttacctgctttgtctctgtagacagtgggaccctccaccctataccaaacctctggggttgggaaaatcatgatccagagccaaggtggatgggcccccctgctcattggaactccaagcccaagtccctgaaccatgaaccccaaaggacatttttccagttctggttctgcttctggaatgcccagggggtcaggagaagccctccttccaaactttagcaggtgacaatttttccgccttagagacctggcccagcaatcttagcctactctggaagcagtgtccacccggggacacaaggaacaagcagattgtgaacagaggcctcctgggtgccagccactgcactggtccctagagggtagaaagacactgtaactggaagctgccctttgtcaagccccaagcattagcccttctgatctttttttttttttaacatggagtctcgctctgtcacgcaggctggagagcagtggtgtgatcctggctcactgcaacctccatttcctgagttcaagcgattcttgtgcctcagcctcccagtagctgggattacaggcacatgccaccacgcccagctaatttttgtatttttagtagagaagtggtttcaccatgttggccaggttggtcttgaactcctgaactcagatgatcctcccacctccgcctcccaacgtgctgggattacaggcatgagccactgcacccagccttctgatctttcaagtcattattgcttcaaagaacctcctccagtaatacaaggataatctatgcaaagacctcaggagaatatttaaaaataagtatgtatcacaaaaagcagccctcttccctggaggcaaacatgattcacaggttcatgtatgtacacacacacacacacacacacacacacacacaccccaaacataagaaaaagtcactccttgtatgttttgcagtatgattttttttccacttaaccctaccttatagttttttctgtctgttcataactatctagtcagacttcaaatatgtttttgaataggtaagacatgcaaatatgaaataaaatagtgtataagggaatatagaacttcccccttcgttcctatttctcgcccttccagttccccttcttagagacactgtggttgctggttacatatgtagccctccagtcatgttatttatttatttatattatttttcgagatggagtctcactctctcacccagactggagtgaagtggcatgatcttggctcactgcaacagccccctcccaggttcaagcaattctcctccctcagcctcccaagtagctgagactacaggcgtgtactaccacacccagctgatttttgtatttttagtagagagggggttttgccatgttggccaggctggtctcgatctcctgacctcaggtgatccacctgcctcggcctgccaaggtgctgggattacaggcttaagccactgtgcccagcctattgctttttttgtgataaagtctcactctgtcacccaggctggagtgcaatggtgcgatctcggctcctgcaacctatgccttctggattcaagcgatcatcccgccccagcctcctgagtagctgggattacaggtgtgcatcaccacacccagataatttttgtattttttgtaaagatgggtttttgccatgttagccaggctggtcttgaactcctgacctcaagtgatccacccacctcagcctcccaaagtgctacaattacaggtgtgagctgctccatccagcctccagtgatgttttatacacatgcagccacatagagagcccctcctgcacccctccaaaatggcagcacaggccccggctgttgtgcgtctcaatctttgcatctaactgtgtattttggccattcatccatggtagtagagagagggccactgcacagtcttctgctatagggatgaaccataatgattaagcctgtctgctattgacaggtatttaggttgtttctagtctttttgctcttaaaagcaaggctgcagcaaaagcacgtgcttggtggaccacgtctgtctctaggttgggtatttagaaagccgtgatattgcactgcagcttcataaagaagccgtgattatccatcactttactgaggaagctcaggggtaggtctgtatgcacaagtcaggcaggtgataaggcaaagccaacactctgcccaggcctgtgtgtctttttttttttgagaccaagtctcgctgtatcacccaggctggagtggagtggcacaatctcagctcactgcaacctctgccacctgagttcaagcagttctcctgcctcagcttcccgagtagctgggattacaggcacgcgccaccacaccttgctaatttttgtatttttagtagagatgaggtttcactgtgttggccgggctggtctcgaactcttgacctcaggtgatccacccaccttggcctcccaaagtgccgggattacaggtgtgagccactgcgcccggccatccctgtgtgtctgaaagccagtgttccttccacttccctcccttccctccctgttcctcatttctgctgcaggccccgggagcaccccctgctcagggctctgtggctgaccatataaagcgtcagagaaaaactggagctgcttcctaatacggtcacaagagggaaatcctgggcctgcagctgggacttgctggtggcacagggcccatgagatgccggctgggacacaggaggctgggatgttgaaacctctgaatttaaccagctggagaggggctcgtggggccagagaggcagaaacacagccaactatggttgggctgggtcgaggtgaaggagaagtggctgaataatgtgggaggaagagcccgatgctgaagccccacgaccctgccgtgagatgtgcggctgcctgcaccagtcttaccttcactccatcgtcataccctggcttgcttagaaagcttttacagaactcagcagagattcagatctacctggaagtatggattaagtgcttgttgtgtgcacggcactgggagagatgtcccaaacaaagaggatggaagtcatattcctctttcagaagctagtgatggagttgaaaaggcagtgtggtccttccttctttttaaaaattcattttattctttttttttttttctttgagacagtctcactttgtcacccaggctggagtgtggtggcatgatctcggctcacataacctctgcctccttggttcaggtgactctcctgcctcagactcctgagtagctgggattacaggcatgcgccaccacacccagctaatttttgtatttttagtaaagacggggttttgccatgttagccaggctgttctcaaactcctgacctcaagtgatctgacctcctcgatttcccaaagtgctggcattaaaggtgtgagccaccatgcccggcctcttccttctttttaaaaattccttttattcttttcttttctctatctctcatctctctttcttcctttctttcttactttccttccttccttccttcttttttttttttttttagagtctcactctgttgcccaggctggagtgcagcaccatgatctcagctcactataacctccacctcctgggttcaagtgattctcctacctcggcctcccgactagctgggattacaggcgcctgccatcatgcctggctaatttttgtatttttagtagagacggggttttgccatgttggccaggctggtctcgaactcctgacctcaagtgatctgacctccttggccacccgaagtgctgggattacagctgactgagtgtctaccctgtccctggcactgtgcggggtgcaggagatacagtagtgtgtgggtcacagtccaggaggtaacatttaggcagagctctaaaagaggagagggaaccagctgtgggaagatgaggggaaaagtgttccaagtggagagaacagcatattgaaggctctaaggtggcaagacttccctctcgtgaaatgaagggagcatagtaagagtcactaaataacattgattgagcacctactacataccagccgccatgctaaatgcttttcgagcattatctcgcagcacatctatgaagggcttgttcgtatgcctccctgttttgtagatgaggataagtgagactcagagaggttaagggacttgcccagggtcacacagcgaagaagtagcaaagtgaaggttcaaattcaagtaccccatacccagttctgagcccttagccactgccctttactgcctccaggtcaagggcttgagtgaggacaggttgggctgtaaatgatacctacattcaaaaggggcgtggcagtggacatggccccagaggagctggagatggagtcgaggcctgaaggagggtggggcttgattgacctttgttcaggtgaccacagactgggctcttctctttgggaggcttgtcctggggacaggggacactgattgaacaggaaatagcccctggcctggctcagtgtagtccactgagtacctactgccgccgtgcaaggcccccaggtcacggaggtgaagtcaggctgtccctgctcccaggaagctgtatcattaatttattcccctggcatgcatttagcaagcatttagttagcacctattctataccaaggcctgtgctgggactgaagaggagaaagggggttccccggactcaaggcacttgcagctggtgtttgcaggatgggtgggagggtcctgggtgatggaatggggaagaggggtgtccaggcaggcagccccccactcccagccccaccaggctggatgttgctcctgggccccgcttacctctaacccttgctttgcttctccatttcggtccgatggagccgcttataccaagctgcttatagttcacccccacggaccccgtgtcctgtttttctgcccatgtccctgctttgtcttgagctggttaacaccttgttgtcctttaagactcagtgcagggaatacctccccacctggaggtttccctgaccacccccaatgtgggttagggccttcccttccttgttcctatcattctctgttcttacgacgtgttttaatgtacttgtctccccctctgatttaagttctttaagggcaggagctatcattgatttctttatctccagcctctgacacagatgtggtatatagtaggtgctcagtaaatggttgatggctatttagacaggcatatgttgactcattcattctccttttaggggatggtgagaacctccgtctccatcaatcctgtttccttttttttttttttttttttttttttgagatgggttctccctctgtcacccaggctggagtgcaatggcaccaccttggctcactacaacctccctccacctcccaggttcaagtgattctcctgcctcagcctgccgagtagctgggactacaggcatgtgccaccatgccctgctaattttttgtatttttggtagaaacagggtctcactgtgttgcctaggttggtcttgaactcctgagtgtgagcaatctgccctccttggtctcccaaagtactgggatcataggtgtgaaccactgcgcccaacaatcctgtaccttcaaagaatattcctctgcagcacccccagacattacataccattgtccctgagtggactgagccctggaaggaccttcccactctctctttttctttctttttcttttttgagacaaggtctcaccgtgtcacacaggctggagtgcatggcacaatcacggcttactgcaacctcaacctcccaggcttaagcaaacctcccacctcagcctcccaagtggctgggactacaggtgaatgccaccatgcccagctaatttttaaatttcttatagagatgggggtctcactgtgctgcccaagctggtctcagacttctgggctcaagcaatcttcctgccttgacctcccaaagtgctgggattacagttgtgagccaccacacccagccagactttcccactctctaattggctccagcccttgactaaaaggcccttgagggctgggatcctgtgtttttttaatgttctaatgtagtcccagcaccttttgcatggcatctgggacgtacagaatgaatgaatgaatgaatgaatgaatgaatgaatgaacgaacgatcagtagtttctgtttctgttggatgggcctaggctggatagcataatggaccatgctcatacctgggggcgggccaggctgggcttggtgctgccaggatcttctttggtgacctcggtcaagtcacttaaccctctgttgcttggttcaccctagctgtaactgagagatggatctgtggttctccctaagtcacttgcagggaagaggatacgctttatggccatcagagtcttgggcagtactgatgtttatcgtttggggaaagcagttcctgtgagacgggttggagcctgtctcctgaactgtgacctcaaccatgggaaaatctagtatccagtaaggaaaaatcatgacaatagtgccttaccacgtacagcatggcgggactcgccttgtgccttgactcctccgtccctgatctgattattttcagatgctcctattcacccagtaggagaggactgctattttttaaatggtaaagtgcatatgacataaaatttaccattttaaacattttaaagaaaacagtgccattaagtgcattcacaatgttgtacagctatcaatttcaagacagggtcttgctctgtcacccaggggctagagtgcaatggtacaatcatagctcactattaccttgagctcctgggatcaagcaatcctcctgactcagcctcccaagtagctgggactacaggtgatcaccaccatggccagctattttttttttttttttttttttgtagagagggggtccggctgttgttgcctgagctggtctcaaacacttagcctgaagcaatcctcccaccttggcctcccaaagtgctgggattacaggcatgagccactacacttggccccagagcatttttatagcctcaaaaggaaaccttatacccatgagcagttcctcctcatttcccacctctttccagcctctgggaaccacaagtctgttttctgtctccatggctttgcctactctagacacttcacataaatgagatgatagagtacgtgacttttcgtgcctggcttctttcactaggcatattttcaagcttcatccacattggagagctcatgtcagtgttggtctctgttttgcagatggggaaggtattaatgatcaggagcaggcgctgtggggtaaacaggagttctagttcccaacttccctccagctgtgtaacctggtgacaacctcaccatgcctcactttgccctcctgtcaaacaggcggtggggaaatcactgttactgagtagttgtgaagatgccacgaggagatgcctctgccatcttctagagactgagtcactggggtttcttcttagatatggacattgggaggtcccagaaagagatcagagggtggtgggaggagagagagcttggaggattattaccttttcctccctccctcctggaccacagttttggcagctgtgtttctgtatgactgcggatccctctggacagcccctttttaggggtgtgtggctttctatgcctccaatgttcagttaacgacattccctctctggctgagtgcggtggttcccacctgtaatcccagcactttgggaggctgagactggcgcatcacctcagctcaggagttcgagaccagcctgggcaatatggtgaaaccctgtctctacaaaaaacaaaataaaaattacctgggcatggttgtgcacacctgtggtaccacctacttgggaggctgaggcgagaggatcacttaagcccagaaactcaaggttgtagtgagccaagatcaccccactacactgcagcctgggcgacagagcaagaccctgtctcaaaaaaaaaaaaaagtaaacaacattctcttctgttcttgctcttcagacttaactgctcccgtcactggttgggtttctttaattctgcacacatatctgtaaacactttctttattaaatgttcctgagttaatatcttaagcacactgttcattttctgtgccacctgttaaatgatgagcatttaatatgattgtcagcatccaaaaaagatcctgcgtagtgcttagttcggtgcccaacacatagtaagtgctcaatgaacggtggctgttatttaagccagtgaggtccggggaggtaaagtggcaggtcggaggagtggagctgagatttgaacccagagctcttcaaaactccacagtttggccaggtgcaatggctcacaactataatcccagtgctttgggaggctgaaatgagagaattgcttgagcccaggaatttgagaccagcctgagcaacacagtgaaacccatgtctctacagaaaatataaacatcagccaggcctggtggcgcccgcctgtagtcctggctactcaggaggctgaggtaggaggatcacctgagtccagaaaggtcaaggtttcagtgagtcacgttcacaccaccgcactccagcctaggtgacagagtgagaccccatctcaaaacaaacacaaaaccccccacagttgcaaaataaaacataggcagcttggaaacccactctcgccctttctcctcttcccacgtacctggaatatcagtgaggcccagggtttccactaagactccaagctccagtttccccatctctaacatgagaatattgagtgcttctgtgcaatctgtctaccctggaggaggtctggaagtaagctgggttctctgtctgcagacgtactctggcctcttctgcgtggtggtcaacccctataaacacctgcccatctactcggagaagatcgtcgacatgtacaagggcaagaagaggcacgagatgccgcctcacatctacgccatcgcagacacggcctaccggagcatgcttcaaggtgagtgaactcagggctgcacggggccagctccagggagcccctcctgtcctgcttgtctgcagttcttgccaggaatgtggagtttggcaggcactgcgagggaccaggagttactgtggctgaaaaagggaaaaagcaaaaggaacatctgtgtttgcagcctgggagggtgagggagagccaagagcttgggcaaatacgggcatgggcccgctccagctccagctccggggctcgctgcccaaggtccccgtcgggccagctgtctgcaaaggatggaaagagggtggggaacagccctggggctgagccattgtggtctgtgttgacacctacctgtccctcaacccctgtgggactgtgggtaaatatcttttcctcttcagcctcagtttcctcatttgtcaaaaggggtgatagtctctatcttgtagcttcttgtgaagattgttaatgctggtttttccaaacttaagacttgtgcctattactttcatgtttatacgttattatttttactattgttttattatttttgagacagggtctcactttctcgcccaggctgaagtgcagtggtgccatctcggctccctgcaacctccgcctcctgggctcaagcaattctcctgcctcagcctcccaagtagctgggactataggtgtggactgtcatgtcaagctaattttaaaaaggtgggtttttttgttttgtttttgttttgttttgttttgtttttggaagtgacaggatcttgctatactggttggtctcaaactcttggcctcaggcgatcctcccactttggcctcccaaagttctgggattataggcatgagccactgcacccaggccttctcaccttctatttagaacactttggagcccctgaaatagccacccccaagtcaaacagagggactaggcagttaatgcaaacaagtgtaccaggtcaggcgaagagtacaagaaactcgaaaactcacaccccctctgaaagggcaccaacaggtgggaacccagggatctgagttgggagttgagaggagcccaattctggaagttcttgaggccggaatccaggtgtgcctgagagatgccacgaccccgcccccaagatagagggactcaggtataagtgccccaactttctgacagtgagccagactccacaggtaggaccagaatcttggcccttctaggcagggcctgccattacctccaaagaccagcaggtggagccttgcaaaggcaatcttggagctgtaatctcaggttgtaaagtgatggctcctggagtcaggtatctgtcttttttttttttttgagacggagtctcgctctgtcgcccaggccggactgcggactgcagtggcgcaatctcggctcactgcaagctccgcttcccgggttcacgccattctcctgcctcagcctcccgagtagctgggactacaggcgcccgccaccgcgcccggctaattttttgtatttttagtagagacggggtttcaccttgttagccaggatggtctcgatctcctgacctcatgatccacccgcctcggcctcccaaagtgctgggattacaggcataagccaccatacccagcaattcctggttcttttctggagctgaggtcccactaagcacattttaatctaaataccaaaaagaaagaaaattctgttagcaaaggagaaggagggggagcgacagatgggtaagcatttctacagtgctctgaaaaaatttatttgtaacttgaaaaagtctttaatattgtatattcattctagaaaaacttaaacatatatttaagtaaaagagaacttgctggcacctatgattctatcatccaaaactcatcaccattaacattttgttacgtgacctttcattacactaactgaactaaatggcatgaaatgaaggaaatttttactatctgaagataattcgttccagaaaaagatcacttaaaacagagaccaaagtttcactgtagatagtatgtgtgtggaggagggaaagagagtgggcaaaatatttgactgagcttgaaaaatgacattgcaggccaggcacagtggctcacgcctgtaatcctggcactttgggaagcccagatgggtggattgctcgaggtcatgagttcgagaccagcctgggcaatatggcgaaaccctgtctctacaaaaaatacaaaaattactttggtgtggtagcacatacctgtagtcccacttcttgggaggctgaggtgggaggatcgcttgagaccaggaagtggaggttgcagtgagccgagatcacgccactgcattccagcctgggtgagagagccagaccttgtctcaaaagaaaagaaaagaaaaccaacattgcaaattataaaaataggttaatttcagcttacatgtaataagaattttattttaattacaagtaggtgctaatttgtagattcagtataaaatgaattaagagtgggtgtggggtttttttctgtaactttttctgggctgagggatgaaatcatgtgagcataaaacgacatcttcatgtcatgcttgacttctgcagcccgagctaaaaaggatcattcttacagatttatttgatgggtcaccagttttcctaagggcttcttttacttctttagtgtttaagtctctcaaagcccctgtggtcttagcgttcattcagctgtgaattgccctgaatctttttctttcttttgtctttctttctttctttttttttttttttttccggatggagtttccctcttggtgcccaggttggagtgcaatggtgtgatctcagctcactgcaacctccacctcctgggttcaagcgattctactgcctcagcctcccaagtaactgggattataggcatgtgccaccacacccggctaattttgtatttttagtagagatggggtttcaccatgttacccaggatggtctcgatctcctgacattgtgatctgcccgcctcagcctcccatagtgctgggattacaggcatgcaccatcacaccaggctaattttgtatttttagtagagatggggctttaccatgttggtcagactggtcttgaactcctggcctcaggtgatcctcccacctcggcctcccaaagtggtgggattacaggtgtgcaccaccacacttggcccctgaatcttttttttggcctttccaaggccactgactttgccagtcactgcaccttgttttccagaactgccactttgttttgtgttcatatcatgatggtggctattgatacccaataattggcaaggtgaagccactgaatcgtcggagaaggaggtttcggtggagtttgatcgctcttgtagtcattgaagaatacttttgtgttgtggggacttttgctttcctagaccagcagtccccaacctttttgacaccagggaccagtttcatagaagtcagtttttccatggaccgcaggggagagatggttcgggatgattcgagcgcattacatttattgtgcactttatttctatgattacattgtcatatataatgaaatcattatacaactcaccatcatgtagaatcagtgggagccctgagcttgttttcctgcaactagacggtcccatctgggggtgatgggagacagtgacagatcatcaggcattagattctcataaggagcacacagcctggatccctcttatgtgcagttcacagtagggttggtggttctataagagtctaatgccgcctctgatctgagaggaagcagagctcaggcagtaattggagtgatagggagtggctgtaaatacagatgaagcccactactcacctcctgctgtgcagtaccagtcggtggtttgagatgcctgcgctagaccacctcttaactgtgaggcaatgttgtaattgacaaggacaccctgtgttcatatatttgattcctcatggtctctaggttttaacacaaaattgcatagtcagctctcttgaaactacttagaaatgctcacttgacacatagtaagctccaataggaaatgactatcatgattgagcacagcagcatgtcttcagtcctagcactttgggaggccaaggcaggaggatcacttgaggccaggagttagagaccagcctggccaacatagtgagctcttgtctctacaaaaaaataattagctggccacagtgcgtgagtctgtagtcctagctactctggaggctgaggcaggaggatggcttgagcccaggacttcaagaatgcagtgtgctatgatcgtgctatggtactccagccttggcaacagagtaagaccctgtcacgaaagaaagaaagaaaatgaaaaccgtgaatatgcacatccataaaagataaactctttacttaatttaaatgttaaccaacacctgctatgccctcgtctattttggcatgacctggtgctttctggcaaatcattgatggcggactccaaaaataaaaagaatcgggcacggtggctaacgcctgtaatcccagcactttgggaggccaaggtggggggatcatgagatcaggagatcgagaccatcctggctaacgtggtgaatctccgtctctactaaaaatacaaaaaaaactagccaggcacagtggcaggcgcctgtagtcccagctactcagggggtgctgaggcaggagaatggtgtgaacccaagaggcggagcttgcagtgagccgagatcacgccactgcactctagcctgggcaacaaagcgagactccatctcaaaataaataaataaataaaaaataaaaagaatgtcaaaaataatggagaaaaatttaagcttgggaagaattccgttcacctgcttaattttttctccattcccaagtaggaaattggtttttgtgaagaaacacgtaggcccagtgtgttgactccattgataaatggcacgatctcattctgttaagtcactgggctgcgatccacactaagcttaccatgaaggtggagagagaaagctagcacatgtggcttcttccttgagttcttcatggaaaagatggggtgtgaaaaggcgggattgaggagggatgggtaacacacatgcactgaatataagatgaagcattgcagttgtgtcacatagacagtaagttcctgaggacctataaactccatccttcttgcatgtgcatcattgtatctccagcacattttctggtgcctggcacatagtagctgctcagtatttgttgaatcaatgaattattagagttatttatagaaaagaacctaccagggtcaggatggatggggtgggttatttgagagaggtggggctttataagcctcgaagaatggtttgctaaggtgagagaagggggcagggatggctttctagccaagaataataaaagcataaatgtaggggtgagaatgggtatgatgagtgtggcaggagctggtttagaggggttgactagtatactgtggcagggagctcagagccagagctcagccctttgctgcctcacaggagttgggaaaatgggagggactttctaagagatacttcacaacatggcaccctcccaagtggaagccaagccccttgagggtatgggaagagaagctgatatttaaaatatgtatcttatatctgcatatgcataaattatgtcatgtttattttttaaattctccccccctttttttttgaggcagagtctcgccctgccacccaggctggagtgcagcagcacgatctcagctcagtggtatgatttctgctcactgcaacctctgtctcctgggttcaagcaattcttgtgcctcagcctcctgagtagctgggactacaggcacacaccaccatgcctggctaatttttgtatttttagtagagatggggttttgccatgttggccaggctggtttcaaactcctgacctcaggtgatctgcccgcctcaacctcccaaagtgctgagattacaggcatgagccactgcgcccggccgtggtttgtttttggaaagatgttacatacaaattcaaaaggtgaacttctcccttcaacccttgtgcattagacccttagcttccctcccaagagacaattatggtttctagtgtatgaggttttctcctagagatatttttgcaagtataagcaaataggtatctattttcttccctaagatttccctacaaatactagcattccatatatatacagtcctatattttgccagaggatgttacatatcagtgcatgtaggaattccttgttcccttttttaaaaaattggtttttatttttgttaaaagtattcatgcagacggcttagagtcaagtaatttttgaaggcttattaagaaaaatagccatcctctgctacttctcaactcctttaattgattttttttttttttggtatttaccaccatatctctgaaaacaacacttgatcattgtgctgctatcttaattttgttttcaattttaggtatcatctattgactttcctccatgaaagatgaaatttagctcattcaccctctggatttgcccctatttcctcgttccaacacacatgcctcatatcagagtcccagtataattttatcttagttttgacaaactcagtgttcagagtttccattattatgactatgtaatgctatctagagtttacattattatgattatgtagatgttattcaaagctgagctttgcactgctttgtgactatttttcttctttctgtatgacttttctttttcctggagttagcaattgccttttttttccccaatcttgttttccatgtatttaaccaccaattctgccccaaaatctctttctaaatgtgttaatctccttttaatatgtccagacatgtattggatatcatattgatatcatctccttgaatgtgatctctactatagccttctgatctgccctggctttctctatagctagtaactgtcatataggatctttttcaccatccttgaaattccccttagtgctttcatagtggattccttgtttcccagttttcatgtcttcctctttcttgctttactctcctgcttaaatcaagcactttgtccagtagcttcccaagaaagaatgtacgtgatcttgaggcattgagaacttccatatctgagaggcttgatgcttctctaacacttaaaggatagtttagttgggtttaaaatttcaggcaagaaagttgttttcagaaagttataaataactttttttgcctgagctttttaaggcatttgtgttgttgccttctagtttcagttttgagaagatgaaacccaatctgattcgtatgtgtgtatgtttgtgagtgtgtgtgtgtgtgattatattcaccttcctggctgggaatattcttgatcctttgtacatgaccagtttttgtttttcctccttctctagaagcttttagactgtctttgtacccctattcaggatgatgggacttgctatgagtccatttttatttgttatcctggacacttagtggcccaattaatctataaacgtgtgtccacaaattctgggaaatgttgcaaattatttcattgatgctgtctttctccctgtgttctctgtttctttttcttagaagtctttttatttccataatggaattcctagaccaatcctataatttaaatctctttcttttgtcattttcatcactttaatgtttttaatggtattttctgggcacttacctcaacttttttccctaacccttccattgcgttttaaatttctggtatatattttattaaattccaaaaattctattttatttttaaatgtttctttcatatgacattctttttctgtggttgcaatatcctgtttctcagaggatatttaatgcagagtctatttcctccaagatacatattttcctaattgttttaacttctgtctgtcatattagtggatttcttcagatgtcttgggattcttggctatccattcatcttggatgctttagtacacaggataccaaattgttgatggaagctcagtgcttataggatgggcttgctgatgtgcttggctataatatgaaagcactgggctaccccattaggacacttctgtttcgtctttcagtcttttgttcatgggctaatctgattcttcagagaaggtttgtagaaaaatcttctgcctggaggttaaagatttgtctagcatcattttgagggtctagttgaaaagaagctgagggtttcaaaatgtgcagtgaaatttgtacattataccttccttctttcagtatggttcctggtgtccccccaggacggagaccctctgtttaaccctcaccagagactaaacccaccaccttctgtggggtgtgagaagggcagtcacttggcttcagggagtgtagaagatatgggaggggtctaacagtgccttatatttgacccagtccttatgtttttgtctcctccttgatcttttcttccagaggcccctggcattgccagtttctgaggtttggggcagaaatggggaattcggtgttgaaattaggtcgtttcccacctttcctcactgctcacctagacttttttcttggtacctttttttttttttttttttttttttttttttgagatggagtttcactctcgttgtccaggctggagtgcaatggcatgatcttggctcactgcaacctccacctcccgggttcaagtgattctcctgcctcagcctcccaagtagctgggattacaggcatccgccaccacacccggctaatttttgtattttaaatagagatggggttcaaccatgttggtcaggctggtcttgaactcccgaccttaggtgatccacccaactcggcctcccaaagtgctgggattacaggcgtgagccacggtgtctggactttttcttggtacttttcaacgcttatcccattttctgtcttccaagatggctttgctgttctcccctctctagttctttttaaactgcctcatgtatttttacactttttggtttgtttgtttttttttgggggatggagtttccctcttgtcgcgcaagctggagtgcacgatctctgctcactgcagcctccacctcccaggatcaagcgattctgcagcctcagcctcctgagtagctgggattacaggtgcatgccaccatgcccagctaatttctgtatttttagtagagacgggttggccaggctcgtctcgagctcctgacctcaggtgatccactcacctcagcctcccaaagtgctgggattacaggcgtgaaccaccacgcccggcctttttacacttttttttttttgccttttcccccctcttttgtgtggagaatggggtcttgttatattttccaggcaggtcttgaactcctgggctccagctttcctcatgcctgtgccttcctaagagctgggattccaggcatgagccaccatgcccggctaaactggttcatgtatttttggaaagtcttttacagttattttagtaaggtttaggaaggaagagagctaaatgcatgcactcagcctaccatcttctcatgggaattctctcatgccttcttttacaaagaagtgataataataatcatggatttttattatatgcttcctataaagctcagggctttacagaaatattctcagttaatctttaccacaaacctacaaggtggacaggaccagattaggaattttaaaattaagccctgaaactattaaggtgcaggcatatgtcataaaaaaaaattaaattataaagtaaagaaggctgacaaaattgtttttgtttttgctttttttagagacagggtcttgctctgttgcccaggctggagtgtaatggtgcgattgtaactcactgcagcctcaaactcctgggttcagcaatcctgcctcagcttcccaagtagctgagactacagagatgtaccaccatgctcagctaattaaaaaaaaacaactgttttttgtttgtttgttttgagacagagtttcacccctgtcacccaggctggagtgcaatggcacgatctcagctcactgcaacctccacctcctgggttcaagtgattctcctgcctcagcctcctgagtagctgggattacaggcacatgccaccatgcccagctaatttttgtacttttagtagagatggtgtttcaccgtgttgaccagactggtcttgaactcctgacctcaggtgatccacccaccttggccttccaaagtgctgggattacaggcatgagccaccgtgcccagtcttttttatttttgagacaggttctcactttgtcacccaggctagagtgcagtggcacaaacacggctcactgcaggcttgacctcctaggctccagtgatcttctcacctcagctccccaagtagctgggactgcagccatgcaccaccacacccggctaatttttgtattttttgtggagacgggatttcaccatgttgcccaggctggtcttgaactcctgagctcaagtgatccacctgcctaggcttctcaaagtgctgggattacaggtgtgagcccactgtgcctagtgaaaaaactttttttttttttttttttttttttttttttagagataagatcttactgtgttgcccaggctggtctctcattcctggcctcaagtgatcctcctgccttgacctcccaaagtgctgggattatgggtatgagccaccgtgcccagcctaaagttgctatttttcccatgatgtttatcttcgtggtgcttatgaaatggcaactatggcattcttccttctcgtgcatgcctgtgtgggtgtgccctcagcatatgcttacaaggtttattgggtgatccaacgctagccgcaagagctattattagctcccttttacagctgggaaaacagactcagaggagtggagaacttgctgcagatttgttaagtgtcagagccaaatatacacttggattatcctgactccaaagccggagccctgctggtcagtcggtgacaccgggcaaccacagggatccccctcaatcccacggaaggctgtctactgtcttcatctcagagtgttgacagctcaaagcttaggaggctggagctaagttcaataaatgaacgtgatgaataggagaaaagcgccattaaagccctccagacaagaaccactttggagcccctccatgggtccctggggtgtaggaggggcaggaaagcagataagattccattctgagcctctgcacttgccctatgcaagatagccacaagtaatgttttgtcctcacctcattagcaacaaatggccacactcaggggattaaaaaaagaaataacagccagcctttatcagcttggggctcttggctaattcctctttaagcttaagacaactctgcgggtggagtgatccaaacgactttctccactttgcaagttcccacactcggctgtatccttctgcttgagattggcagccccctggggatggttcctgctcacccaactcccctgaggctgctccccagtagaggcagagagaggaagggcactgatgtcctcagggcccctgcaataggtcaggacctgggttcactgctccatcaatcccacattgctcggccctcactagcaccacacagggtgggtggcagcctccccatttgatcaatggggaaaactcagcacacctacttggccccagaactgagagtcaaacctggggacccagcttcgctgccctcagaatgttactcttccctcctgggtagcgtggtatagatagtgtagtattcttgtccccatataacggaagaggaaactgaggcccccagaaggctaagggactagcataggccttgtgtcttagcctgttaaggctgctatatcaaaataccatagactgggtggcttttaaacagatatttgtttctcgtggttctggaggctgggaagtccaagatcaagcttggtatctggtgagggcctagtgctgccttctcgctgtgtctcacatggtggaagggacctgctagctctctgggtctctcccccaatgaggattgaacccccatgatctcatcacctcccaaaggccccacctcctaatatcatcactttaggggtaaggattccagcatatgaatttgagggagacatgagcattcagaccatgacaccttgtaatcagaaaggggttaaatatctttggttgaatatcctgtcctgccgattcagaatcactgctgtctataacctcttccctagatcactgttttagatgatgatgataaagatgatattaacggcaattaccaagctcttaaatgtgctgtgggtaaaacaattttaagctctttctgaatccagtctctttcaatcatcttcatgcccttgaaaggtctggatttttgtcgatttccctggtgaggaaacgggccctgggggcagaggtgatagggtggagccaagaagtaattcccagctgtttctctgcagaggcagtgctgctacaaacacatctccaggaaggggtacagccaaatgcttctctgtctcttgtgggttttgcagtggctgtcagctatgtgtctggcccggttgggaatgatgggggactgtgtgtgggaatgaatggctctgtctggctggctcagtctttacagaggtgctaggagtgtctgtttggtgctctgactaatcatgaaaagttcacgtttttatctttattttatttttatttttggtacccatggtgcattacagggaagggagacagcaaaggagaattatttgttataaaatagtaaatattggccaggcacagtggttcacacctgtaatctcagcactttgggaggcagaggcaggcagatcatctgaggtcaggagttcgagaccagcctggccaatgtagtgaaaccccatctctactaaaaatacaaaaaattagccaggcatggtggtgggcgactataatcccagctactcgggaggctgaggcaggagaatcgcttgaacctgggaggtagaggttgcagtgagccgagattgccccactgcactccagcctgggcaacaagagcaaaactccgtctcaaaaaaaaacaaaaacaaaaacaaaaaccgtaaatattaaattgaaaaagggacatacttaagggagtgaacctgaaaagccccagctgacacttggcaacaccttccttgtttgttttgggcttttttgagacagagtctcactctgttgcccaggctggagtgtagtggtgtgatctcggctcacctgagcctcagcctctccaggctcaggtgatcctcccacctcagcctccagagtagctgcatacaggcatgcaccagtacaactggctaatttttgtattttttgtagagatgaggttttgctatgttgttcaggctggccttgaactcctgagcccaagcaatccacctacctcggcctcccaaagtgctgggattataggcgtgacccacagtgcctggccagcaccttccttgttaaattgcatgtgtcagccacctccctcggtgtcctcccagcctctgggcagtctggctccccattcctttctttatccaacagcatttttttgtgagacaaggccttgccctgttgcccaggctggagtggagtggcacactcatagctcactccagcctccaactcctgggctcaagtgatcctcccctctcagcctcccaagtagctgggaccacaggcacagatcatcacgcctggctaattttttgattttttgtagagatgaggtctcattatgttgcccaggctggtctcgaactcctggcctcaagcaatcctcccgcctcggtctcccaaagtgctggaattacagatgtgatccaccacgcccggtcattctaacaatattgattattagatgttgccctagacacagcctactgtgcgtatgtgtaaatacgaattgaatcatcccacaagtagctgctaagtagaggaggtccagagagtggggaagtgtagccctggggaccttgggaggacaggggaggcttccttggaaggtgaagtgtaggcttggctagggaacttgatataggttctatgaggctgctggggctggagcagagagaagggggagaatgtaggaggtaggagtggaggcccaagagggagagcgttggttttcctgtctcctacaccccttcactggccagttctgctttcatgtttttatttattatatattttttgagacagagtttcactctttcacccaagctagagcgcagtggcacaataatagctccctgtaacctcgaactcctaggctcaagcaattttcctgcctcagccttccaaatagctggggctacaggcacacacctctgtccacagctaattaaaaaaaatttttttttcatagagataggggtctcgctttgagtctcaaactcctcgcctcaagcaatccttctgcctcagcctcccaaagcactgggattacaggcatgagctcctatgcccagcccagttctgcttttacaataccagggcttcctgtaggtttggaaaacacctgttgggttgcagcaaaggctctcaaagtatctcttcttactcagcatgtcatcctaaccaactctgccgggagagtagagtggggagatgaaggctggagaaagagaagggccctcacttacagaatggcttaggtcatgggctctggagctgggttcacctcccagctctgccccggctattactttgtgcctcagtttcctcacttgtcccgtgaggatgatgactgtgcttactccagttgttacaagggtgattcggtcagtgtgtagggacacggtgcatggacaggacaagttcaacaggcattagcagtcagctgccgaggacccaccgtcaagggccatgcagtggccaccttcacagtcacaccacagaagatccagaacctctggcatctgcctccgtgcggggcattaggtagagagccacttttctgcaggcaatggaggctgagacctttcttctttactagcccaggggtattgatggccctgcagagacgggttttgattacctctcactggatcccccagcagcctgttaccagaaagaagggcagacgcagggagcctgggtctgtgctcagtccccgctgggttttctccttttatggtcagcctacagtgctctggcttcccagacagaatccaccagcttgtgtttgggcttgggccgaaatagctggtctgtggggagctgggtacctcctgggagtcctcaggcccacagcgggggaggaaccgctgaagccctttatcttctcaggaaacgtgcctggggccttacacatccgaggctgggtggggagtctggggaggaggaagggagagaggcatgtttaaggatggggtgtgaggtgacatgagccccagggatctgggctgggaagctcagccccaggcgggtcctgatgatggccggccgcccccagctccagccttcccagactccacggaggctcggtactgtgtccccgcccactttggagcttctgtcccaggccctctgcttgggatgctctgcctcgacctctccccaggagattctttcacatttttcttaatgctgttcagtggtcacctctgccgtgaaggcttcctgtcttgctcaggtcagtgtgaaaaaacaaacaaacaaaaaacctgacgtctatagcacttgggttcacatccatcgtagcactgctcatctcttacggtcatttctttgcccatctgactcccaccctgggtcatgaacttctcaaaagcaaggataagcaagtcatgaagctcggtgcattggcttgagcctgtgatttcagttacttgggaggccaaggcgggaggatcacttgaggccaggagtttgggaccagcctgggtaatattactaagttaccttactaggccctgtctctacaaaaaaaatgaaaacaaaaaacaaaaaaaccattagccaggcgtagtggcatgcacctgtagtcccagctgctcaggaggctgagatggaaggatctgttagcccaggagttccagactgcagttagctatgatcgtgctactgcacttcagcctgggcatcagagtgacacctcatctcttaaaaaagaaaagaaaaaaaaaagcagatcttattgacttttgtgctttcggtacctggctcaggactcgtttgttgaatgaatatgtgaacacgtgaatatgcattttccattgcttctaccttggttgcctctctgagccagagagcaattcaaaataacaagcatttcctgagcacctactgtgtgtcaggcattgttccttgtaccttcaggagctcattggttcaggggaaaagcattgaaaatgaacaattttgtaattgttggaaacctaatagagctgcatgaagtggaagaagtcagatttataatcattcagaggtggtataaaatgaacatcatttttaaaaaaggtttatgcggtataatttaaataaattcattttaaggatacagttcacacctaaaattgcagctatgtctgcataactgtctaaattcactcataatttacatggttatgcagccattgctgcaatataattttatatttctatcatcccccaaagaaatcttgtgcacatttttttgtcactccatattcctacccgcagctcctggcagccacgaattcacaaatctactttctgtctctatggatttgcctattctggacatttcatataaatggaatcatatgtgaccttttgtggctggcttcttttttttttttttttttttttttttttttttttttgagacagagtgtctcactgcactcgcccgggctggagtgcagtgatgtggtctcggctcaccacaaactctgcctcctgggttcaagtgattctcctgcctcagcctcccgagtagctgggactataggcacgtgccaccacacctggctaatttttgtatttttagtagagacggggtttcactgtattggccaggctggtcttgaactcctgacctcgtgatctgcccacctcagcctcccaaagtgctgggattacaggtgtgagccaccgtgcccagccggctagcttctttcacttagtataatgttgtcaaggttcatccacgttgtatcatggattcatactatttatatattttttaagacagggtctgtctctgtcaccccagctggagtaccgtggtgcagtcgtggcttactacaacctccacctcctgggctcaagccattgtcccacctcagcctcttgagtagctgagaccacagggattgtgccactatgcccagctaatgtttgcatttttttttgtagagatagggtttcaccatgttgcccaggctggtttcggactcccgggctcaagcaatccacctgcctcagcttcccaaagtgctggaatttcaggcatgagccatggccgccggccataacatcctttcttttcatggctgaatactatcccactgtctgggtagaccacattttgtttatccatctacccattgatgaacatttggttgtttctattttttggatattatgaataaagtccataatttttaccaatatggaaaagaaaaacaagaaaaactctgaatgccatatcatggatagatggcctattatcattccatatcatctgtacctttttccgccagaatgttttgagacatttattaagtaaggatcacaatgatgataattactaaaatggagagaacctgtggaccatgggaaccactaggccatgtgacactcatgtttatattagagaaaggcaccgttttctcaaagcacttttcctccatctgctgaaagattattacaataaatacacaatgcaatacaataaatgaccaatgcaaatagtttctccatagagttatgcagtgtacaacatgcaccacggtccatggccatcctgcaggtaggaggtcaagtggaaaggtctccaactcagctctagaaaagtgcagagttagagaaggtatcatagaagagttgactcccaagacgatgtttcagatacagattagggtatgtacccgaagaattgaaaaggtactcaaactaaaacttgtacaggaatgttcatagcagcactatgcagaatagccaaaaggtggaaataacccaaatgtccgtcaactgttgaatggataaacaaaatatgatccatccgtacaatgtgatatgactcagccacaaataggcataaagtctgggacctgctacaacatggatgaacttcagccacatgctgagtgaaagaagtcagacatgaaaggccgcacatgttataattccatttatgcaaaaatatctagaataggtaagaccatagagacagaaagcaaattggcggttgcaagggcttatgggggagtggctgcttaacgggtagagggtttcatttgggggtgacagaatattttagaactagataaaggtggtagttacgtaacattgtgaatgtactaaatgctcctgaattatgcactttagttatttttttatctttattactattttttgagatggagtctccctctgtcacccaggctggagtgcagtggcgcgatctcagctcactgcaaactccacctccctggttcacgcgattctcctgcctcagcctcctgagtagctgggattacaggtgtgcaccaccgcgcccagctaatttttgtatttttggtagagacggggttttgccgtgttggtctcaaactcccgactttaggagatccagctgtgtcggcctcccaaagtgctgggattacaggcataagccaccgcacctggcttgaattattcactttaaaatggttctttttatgtagtgtaaattttacctcaatggaaggaaaaaagagagagagagagagaatggattaggccagagaagaagtggtggtgggtgcactgggcagaagaaatcacttgtgcaaagcaaggagggagtgaaactgctttgtacggtggagaacactgcttttgagtccaacacaagctcaggcttggggaaggaatcagataaaaatttccaggatctcagagttccctgtgctccacacgggttggcagacagcacccacatggagtccttctgctcgtaaccagcaccctgcaagcttcccacgcctggaagtggtgtgtttttgatgggaacgtcaggccagaggtctcccagcagcccccagctcggagccgcgctggcagctcccaggccttctcctggagcccgctccctctcctgggggccctgtgagcatctgagcctataaatctctcctgctctgggcctaggattcacaaggctgccaggaaagcctgcctctctccctgaagtagtggatcaacacagcccatctgtctgtccatctcaaaatctttccttaagatagtggaggttgtctgggccggtcccaggaggttctctctgtctgggttctaatcacagggtacctggttcttctatccttcaccctcttttaaaaaatcactttttagtactttgggaggctgaggcgggcggatcacctgaggtcaggagttcgagaccagcctggccaacatggtgaaaccccgtctctacaaaaaatagaaaaattagccaggcgtggtggcacgcacctgtagtcccagctactcggggggccgaggtggaagaattgcttgaaaccaggaggcagaggttgcagtgagccaagatcgagccactgcactccagcctgggtgacagagcgagactccatttcagaaaaaaaaaaaaaattaaactggtttcccattttgctctgtcctcgagtgaatttctccccctgggtggaagctaaaggcacgggtatctgtctgtctccagagtataatggagagattaaagtttgattgcttttttcctgctttttttttctttgagatggggtcttgctctgttgcccaggctggagtgcagtggcaaaatctcaactcactgcaacctccacctcctgggttcaagtgattctcctgccttagcctcccgagtagctgggactacaggtgcctgccgccatgcctggctaattttttgtatttttagtagagatgggtttcaccatgttgcccaggctggtctcgaactcctgacctcaggtgatccacccacgtgctgggattacaggtgtgagccaccacgcccggcctcctttctcttataaatagggacaccattgatttaggtctcactccaagccaggatgacctcatctcaacatccttcccttaattacatctgcaagacccttattctaaataaaatcacaggtgggatacagtggctcacgcctgtaatcccagcactttgggaggctgaggcaggtgggtcacttgagcccaagagtgtgaaaccagcctgggcaacatagcaagacccaatctctacaaaaaatacaaaaattagccgggcatgctggcatgtgcctatagtcccagctacaggggaggccgaagagggaggattgcttgagcctgggaggttgaggttgcagtgagctgagatcacgccactgtacacccacctgggcgacaaagtgagaccccatctcaatcaattggttagtcaataacatcgcagtctgaggttctgagtgaacatagcttttgggagtcacagttcaacccaccctagtgaccttgggcaagttgcctcacttctgaacctcactctccttatttgtaaaatggaggcaatgccagtgcccaccccaggagctgctgagagaattcagtgggtcacttcaacacagaagttcagcatacgcctgcagtgcagtgagtgctcgggagatcggagctgttagtgggatcctaatgcggtggctctttcttttctgtctttttttagctttgtggtcatgatggtttcataaagaacaataccgactctttttctattgaccatttttggtgggatgaggaaaagattgtatgtgttcatagcacaaacataaccaggatagaagtagaatgggtgaaagtaggtcttcctcctgtcccttttctcaatacttcaggctcaggcctgtttgttggttttttttgtttgttttgttttgtttttggagtctcgctctgttgcccaggctggagtgtagtggcatgatctcacctcactgcaacctccacctcctgggttgaagtgattctcctgcctcagcctccggagtaccttggattacaggtgcatgctaccatgcccagctaatttttgtatttttagtagagacagcgtttcaccatgttggccaggctggtcttgaactcctgacctcaagtgatctgcccgcctcagccttccgaagtgctgggattacaagtgtgagccaccgcacccatcccaggtctgtttttagagatagggtctcactccattgcccaggctggagtgcagtggtgtaatcacagctcactgcaaccttgaactccttggctcaagggatcctactgtctcagcctcccaagtagctgggacaaggggtatgtctatcacacatagctaattaaaaaaaaatttttttttgtagagactgggtcttgctatgttgtccaggctggtctggaactcctggcctcaagtgatcctcccatctcagcctcccaaagtgttgagattacaggcatgaaccactgcatcctacctatatatctgtctttttaaaacacaaaaggtataacactatgctacctcatcttttatttttagcttaatatattttggatatttttctgtgtccatccacaaagctctgcctggttcttttcaatggctgcctattttatttatgtatttatatcttatttgtttttgaaacagagtcttgctctgttgcccagcctggcatgcagtggcacgatctcggctcactgcaacgtccgcctcctgagttcaagcaattttcctgcctcagccttctgagtagctgggattacaagcgtgtgccatgacacccaactaatttttgtatttttagtggagatggggtttcaccatgttagccaggctggtctggaactcctgaactcaagtgatccaccctccttggcctcccaaagtggtgagattacaggcatgagccactgcgcccggcctgcctatttttaaatgtgccattatataaacacaccagaattgaaaccccagagctgactagtctttaggccttttgtcttgaggatttcgttcaaccaggccacccaaacatccatctataatccgagggaagagagagagaactgattggagttgggcatagaatctgaggaacgtgcccacatccaatcagttctctcttaagattacagatggaagaaagagtcatctctttcaccttgccttcttcagtcccatccatcctcccattcatattcccatccatccatccatccatccatccatccatccatccatccatccaactcatttaccggcctatacactctgtcctccctcccattcacccacccatccactctctcatccactcactcatccttccctcctccgtccaaccatccgtccaaccagctatatacccacccatctacccatctacacacccttccctcctttcttctttctttcttcctatctatccatccatccttccttctttccatccatctattcgtccacctacccacccacccactcatccatttgtcttcctgtctctctacctgtccatctatccatccttccatccagccatctgtctgcctattcacccagcctcccatccatttatcctcccgtccatttacctatccatccattcttccatccacccatcctttcttccttccttctttcctttcttccttccttccactcacttgcccatccacctcttcttccatcctcccatccatctactcatctatccatccattttcccacccatctgcccatccacccacccacctactcacctactcatctgcttatccaccctcccgtccatctgtctattcatccacccacccacccatccatctacctacccatctacccacccttccattcacccatctacccttccttcctttcttccttccttccgtccactcatcttcccatccatctactcatccatccctcaatccatccatctaacaagcataattcagcacctaccatctatgtgccagtactagagatacaatgtaaaaccaagcctaggagatttttgatgaaatgaagcttgtgagagctgagcactgaactagtaggactgaagccagggagtggatttaagaaatgcttgccactgtggcattgtctaccagcagatatgatgctgggatttctacattgttaggtgaccattgaacgtattggtaactgttctcagatctctctttgggaaggaaatgggtcttcagagcctggctccacctcagaggcctctttaagagtagaaggtgatggataatgtctgcttaatcacatctagttctttgatgacctctgtatcttttgggtttctctggtggtaaacaagagagactgactctgtcatctagtagaggaaagggatttgtaggggagtatggaggagctcacagttgcagtgggaacactaggaatcaggctaggtaaatgacagaaactgggctgcttgggcccaggggcagaaaggaagtctgcctcagggctctgtccacctgctgtgcttccctgtccttgactgagcttggagttttaggccagagagtctgaccaatgcagcctggaacacattcttacctctttgttgaaggtacttatgaggcagtcccactaagactgtacatgacggtaggggtgatgggggaaacctcaaggaccacaggatgcttctggaagaagaggaaatggatgctggatttacaaaaaaacacaaatgtgcacaatactatattacagatgaaggaactgaggcatggagtttaagaatatttgcccaaggccacagagcggagaagtggctaagggggaccccaatctgtatagatccaacatctgcgtttggtccctaacctaatctgggtggggtgggcctcccgggacacctccagagctgatgtggctggatgctaatgactcctggatcagtcaggctccagcatctttctggggctgcctctgggactttggggctgcccttttggctttggtcgtggcccctgtagcctgggcaatgagcccagctgacctgttgtcacttccaatgaggccagcatggagaagctttagaatgggagggccctgggaggagccaagtccagacccttagctcagagctcattttaattcatggctcttttttcttctttctgtttgcagatcgggaggaccagtccattctatgcacgtaagtggaactgctttttcttctgttttttttttgtttttttttttttttaatctgtagtcgagatccaacctatgaaagaaaagatccatgagtgcagagatctttgatttgttcatggttccaagtgcctctctttatacctggcaccatgtagatgctcactaaacatttgtgatatatggtcttctgcggaggcaggcaaacttaaactcttaatgacacctgctatcatttggttccatacctctcctccttctaaaaaactagcatttattgaacatgtactctgtgccaggacttgaactaaagattttatatgcagaatcttatctaattgcataacagccatctgtgttgatagggaagatgttaaactgtcactttagtatttcacatttatcaagccacaaacacatcagtgccatatttggtgattggtatcactgtttctttgaagacctaggtacataggcagaagatagtaactcaattttagaatcattgagagagttttcactattgtatttatatgcaagtaacatatattaatatatattgttgattcattgacattgaactcacagccagcagctctgtggctgatgcctggatgaagtttatctgatgtgtatttattacataatgggtatcacaactttattgtgcttggaaacatgagccaacacttgagcactatgctggggacatttttgtatgtgtgctgccgaagggagcacatctgaggggacattttaaactgcaaaataactaacaaaaagccacaaaaatacaaaaaaaggtggcactaaatacactacagaaaggacacttgtttacagtatgagagttgaaactagaaggtagagcattcccctgttcaacctgagctgggaacgtgtgcattgggggaatcgaattttccttactctgcacatgttcacaaatgactacaaaagtgccatgaatattgattttggggttacaaataactttcagcaggtcggtgaatttgaaaatatagaatatataaataatgaggatagactgtgcatatatatatttacataatatataatatgtattatatttaatatatttatatttatatatatatatatttgaaggtctggaagcaactaaagctataatcaacagaggttatttaaataaaatatagcatttccaggtagccactacaaagagtgaggctgatctatttatgctgagagagaacgctctttatagataataccgttgagtggaaaacacaggggcaaaccagcatatgcataatgtaaccgtgtgtgtctttaaaaagagcaggattgcatggacgtgcatatgtttcctatttgcatgaaattatctggaaggacaattaaaaactagtaattagaatttcagatggtgatggatggtaggatggcaatgaactgtattgagagaagattgaaacaattaataagtttggggttgatatagatagaaaacctggaaacaataaaacaaaggcaattataaactccaggaaaaaacaaaagttgggatggaaggagaagtaatcacattggactaaggagcccagctgtgcaagtttggagtatttatctaaccagaataactccctgtgatggacttggctctgtggggaaagggaagaggattagatgggaactgaattctcatattccatggtaggatgtacacatttgatgtttgacaatgaatagtctggatctagagatataatgctacctagctatgaggatataaatgctaaaacaacctgccgacttggtttcctagttttctggcttctaggggtcacctgcattccttggctcatggtctcttcctccatctttaaatcctgcagcatggtatcttcaaatctctttctctggtccccctacctctctcttataaggcccagtacctttgtggttatattagccccacctagatgatccaagacagtctcctcatctcaagcaaacatattcacagattctgaggataggccatggacattcttgtgggggctgtttttcagctagccacagaggcatttgatcccctaggagccaaacccatgtgtgagccacatgtcatctccccaggaaccaaaatagtgtagctcaactgccctctgttgagtgaatgaattaagtgtggtaacagagaggtgcaggaaagagtaggactttcagatggcttcctagctatgtagctatgcacgggtcacttgacctctctgagctgagcttatggagaggctgtgaagatgaagaagaggccaccctgctctcatttccagcacccatgccatcagcaggtgctgtttcatctaaaacggtgctatccaaaagaactttgtgatgagcacaaagttcacttaaaagttcacttaattgagctcttaaaaagtggcaagtatattgcagaactgaatttttaagattttagttaatttagatagcggttcctgccttggacggtatgatgctgaaatatttctcatctctgtccattcctctgactccaccgcctcttcctagttcagggtcccgtcacctctcaccagggcctctgtagcagtctcttaagctccctgctcccattgcttgcttgcttccttcctttaataaatatacattataagaatattcactcattattcattgaataaatattcattagcatgctgtcataaagtgtggattccagaacctaaccccttgggtttgaattctggccccatcatcgtctagttagttgtatgctccaggaaataagtcagttcacttctctgagcctcagtttccccatctgtaaaatgggaacaataagcaccccattgggttgttggaaggatgaaatgagtcactacatgtgaagaactgagaaacaggccactgccccatggtgagcactttgtaaggatcagctgctattgtagtgaaagtgctcactattttttaaaaatccttcctgcaatccagtatccatcttgcagtttgtttgtttgtttgtttgtttgtttttgagatggagttttgctctcattgcccaggctagagtgcaatggcgtgatcttggctcacagcaacctccacctcccaggttcaagtgattctcctgcctcagcctcccgagtagctgggataacaggcatgtaccaccatgcctggctaattttgtatttttagtagagacagggttttgtcatgttggtcaggctggtctcgaactcctgacctcaggtgacccggggagcctcggcctcccaagtgctgggattacaggcatgagccgctgagcctggcccatcctgcagtttgttgttgttgttgatttttttgttgagacagagtctcactctgttgcccaggctggagtgcagtggtgcgatcttggctcactgcaacccccgcctcctgggttcaagcaattctcctgcctcagcttcccgagtattatgccatcatgcccagctaatttttgtattgttaatagagatgggttttctccatgttggccagcctggtctcaaactcctgatctcaggtgatccacccacctcagtcagcctcccaaagtgctgggattacaggcatgagccacttcgcccagcccatcctgcagttctgattctccccacactggttctaaagtcccgttcccctcgtgaaatggtttcctgcacccatgagaataaaactcagattccttactgtgacttggaagactgagtgtgatctgctcttccctcttcacttcctgctgtcctcctctgttgtggccctccagccatgctgggagccattctgtctcatacctgggcccagcatttccctcccttggacctctgtccatactgtttgccctgcctggcccacccttccctccatccttcccacagggctctcttgtaactttcaaggctcagcaactccctggcttccccatccacagcctcccctctcctcccttcccctcgatcttctcagtcacatcacccagatgtagcaatgatatctccaccacgaactatcttgattatttgtttacttggctattgtgtatctccatctcctggaatgcagcgttagcaaggacttggcacactgcccacacacagccagtgctggagaaggaggccttagccattgttaggaaggaaatcccaaaacgatcagacttttatttgcaaatgcatccagtcagcccagaaccaccaacatcttcagtctctgtattcaattttattttgcttgttgtgaaattcagccaaagtgacttgaaggacctacaagttgacagcagggctgagcttttacgcgtagttggtgcttaagagaagccaggctggagccaactgtttggttatgcagttaagaaactgaaaattggccgcgcactgtggctcaggcctgtaatcccagcactttgggaggccgaggcgggcggatcacgaggtcaggagttcgagaccatcctggctaacacggtgaaaccccatctctactaaaaaaatacaaaaaaattagctgggcatggtggcgggtgcctgtagtcccagctattcaggaggctgaggcaggagaatggtgtgaacctggggggcggggcttgcagttagcagagatcgcaccactgcactccagcctgggtgacagagcgagactctgtctcaaaaaaaaaaaaaaaagaaaagaaaagaaactgaaaattggccacgcaccgtggctcacgcctgtaatcccagcactttgggaggccgaggcgggtggatcacgaggtcaggagttcgagaccatcctggctaacacggtgaaaccccatctctactaaaaaaaatacaaaaaaattagccgggcatggtggcgggtgcctgtagtcccagctattcaggaggctgaggcaggagaatggcgtgaacctggggggcggagcttgcagtgagctgagatcacgccagtgcactccagcctgggtgacagagcgagactctgtctcaaaaaaaaaaaaaaaaaaaaaagaaaagaaaagaaactgaaaattggctgggtgtggtggcttatgcctggaaactcagggccttgagaggccgaggcgggagggtggctggaagccagaagtttgagaccaaactgaggaacacagtaagaccccattactacaaaaaatttaaaaattagctaggtgggatggtgcatgcctgtagtcccagctactcaggaggttggggagggaggatcacttgagcttgggagttagaggctaagtgagctatgatggcaccactgcacctcagcctgggcaacagagcaagacccagagacaggaaggaaggaaaggaagggaaggaagacaagaaaggaaggaaactgaaagctgaataaatgtaatttttaggcctgagttgtattttgtctagcatgtaatccatccagtataatcagtttaattagaggccatgggcctggctggagatagagctgtgtgatcagggggctaaagtaagaggaggagggtggtttcacataaaattagagagaggtaagggggtgcttccaggccctggggaggagtttaaactttcgtctaaaatggatgacaggctgggcatggtggctcatgcctgtaatcctagcacttcgggaggccaaggcaggctgatcgcttgagctcaggagttcaagaccagcctggccaacatggccaaaccccctctctacaaaaacaaaaattagctgagcgtgatggcatgtgcctgtagtcccagctacttaggaggatgaggcaggaggatctcggttcactgagcctgggaggcagaaagttggcactgagccaagactgcaccactgcacttcagcctgggtgacacagtgagaccccatctcaaaaaatatatataacaataaaataaataaatgaaatggatgagaacgtgctaagggactcaagccaaggaaggacaaagtttaaccagtgggtcaaatcaggcccttgtctgtctgttccagataaagttttattgaaacacagccgcacccacttgtttacgtatttgcttttgtgctgcagtggagagctgagcagatgtgacaaagaatgcgtgaccctcaaagtctaaaatatttactgtctgaccttttacaaaaagagtttgctaactcctagcttaaacagtgggaaaatgtgaatattatttatattgtaatgataggatgaatgctgaaaatcattatacaaacaatatataacttctgtggaagcagtggttataaaagtaataataggtgggcacagtggctcacacctgtaatcccaacactttagggggccgaggcaggaggattgcctgaggcctggagttcaagactatcctgggcaacttagcgagaccccacaaaatcaaaaaattagctaggtgtagtggcacatgcctgtcatcccagctactcaggaggctgaggtgggagggtcacttgaacccaggagttcgagattgcagtgagtcaagattgtgccactgcactccggcctgagcaagaagcaaaactctgtctcaaaaaacaaaagtaataataactaacattttggcataccaggcattgttctaagcattttatataaatgttcactcatttaatcctcataagaatcatataaaaggtcaggcatggtggctcatgcctgtagtcccagcactttgggaggctgaggctagagatcacttgagaccaggagttcgagaccagcttgagcaacatagcgagacccctgtctctacagaaaatttaaaaatcagccagctgtggtggtgtgcacctgtagtcccagctacctgggagattggggcaggagtatcacttgagcctaggaattctcagctgcagtgagctatgattgcatcactgcactccagcctgggccacagagtgagatcttgtctcaaaaaaaaaaaaaaaaaaatcatacaaggtaagtgtttttattatacccattttataatggggtaaagaaactgaggtatggagaggctaaatgacttgcctaaggtcacccaggtaactggcagaggagggatttgaacttgagcaacctggtcctggagcccattatgctattctgccaattgatgctataggggagagaggcgttgcttctgcctggggttttgcaggacgtgtaggagttgtacagtacaaaatgccagggtgctttgccagtcacataaagaccagggactgaatagctgtgaggttcatcagagacaatttggctttcctaccagtggcaaaccacaggctgcaatggacttggcaatattcgaccctgggagccaggaccagctgcagaatttgtagaattttgcaaaatgaaaatgctggctgagtgcagtgactcacacctggaatcccagcactttgggaggctgaggcgggcagatcacatgaggtcaggagttcgaggccagcctcgccaacatggtgaaatcccatctctactaaaaatataaaaattacccaggcatagtggcgggcacctgtagttccagctacttgggaggttgaggcaggagaatcacttgaacctgggaggtagaggttgcagtgagccgccatcacacactgcactccagcctgggcaatagagcaagagtcagtctcaaaaaaaaaaaaaaaaaaagaaaagaaaaaaaatgcagagcgtttataaagaattaggaagaatttccagatggcaacattagagtatgaagcacagggtggtccctgtgagacggtacaggtcacactcatgaagccagcctggctgggggattaagtggccattgggtggttcttcccagctgctggggctggactgattaaaaggacttggcactggggtagttacaaggccaggaggccataacgtggtcatgagtctggtccttctccgggaagagggagctcagtaccaaattccccaagaaataagaaaggagtttagggtgctcagaccaggaaggcatcttcacccctagaggtcaggggtcagaaaagccaagctatgaatgtttctagaaccagctctaagcacatcaaccttcagacgcccacgagcctggagcttgggatgttttctttggcagaacctcccagggcaatttatttttctcaacagaacttggaaacagtggagcccagcagcaacatgggaaggggtagatgcccagagtttatgtcccactccccatcccaggcaaagtgggagaccatagccacggatagggcacattgatgtctttgtttttttttttgtctgtctgtttgtttgtttgtttgtttgttttttgagatggagtctcattctattgcccaggctggagtgcagtggcacgagctcagctcactgtaatctccgcctcctgggttcaagggattctcctgcctcagctccccaagtagctgggactacaggcacccaccaccatgcccagctactttttgtatttttagtagagacagggtttcaccatgttggccaggctggtcttgaactcctgacctcaagtgatccacccgcctcagcctcccaaagtaccgggatgacaggcgtgagccaccacacccggtgatgtctttgttgtaaaagggaggaggtgagagaggttcaaggccagggtggaaaggaaggaactattgtgggaaaggagaagtgagcagcagcagtctaggagcactggtttgtcagcatgaagagtgtgatccacacatgttgtttgtgcacactgctgtcctgattcttgtcttggatctgaataggttcatgaccacctacgcaagtggtttcctacatccaaaaatttctctcctttctcttgctttaatcagaatccaaccccttcactttagaatgaagtcaagcaaggttctgacgttagcctgattgaagtaattcatacttaggtgtgaatgactgagtggcttggttcattgattggggcaagtaaagcctcctggaatatatggcagaattccagtggagtggggctgggacttcactctgtcttttctctttgctgatttgttaaaataaaagggtaggaggcagaacatgggccctggtgtcaagtggacctacgttcaaatcctgcttctcctccatttcctatctgtgtgaaagcaggagcaattgtgggctggagcaatttacttcaaacctctctttgcctcagtttccccggatgggtgatggggataattaataactctctcattagattgctgggtagagtaaatgaaaagatctgtgagcccaaagcctagtactgtgcaggccttcaacaaatatcaattccccttcccctgcccttcttctggccttagaaagcaagtccctagagggttgggcctgtgtcatggaacaacttggtgaaatgtagtaaaaggaattctgactgcattagaatcagagacctgactttccattctgactgtatcccttctttgctgtgtgacctagggaaaattgcttacccactctgggcaagactcttccttctataataacatggaagcaggaagaggataaaggaaataattcatgtagagcatttagcaaagggacccttccccctatatccccccaatgacaaacgccaattcttctctgtcttaagagatgggatcttgctatgttgcccaggcttctctcaaactcctggcctcaaggcatcctcccaactcagcctcctgagtagctgctattataaacgtggccagttctctgctgcacctggccagttctcctcttttacacacacacacacacacacacacacacacacacacacacacatatattctggtcttagtttccccttctggggaaatggggtaatgccttcatggtccccatttcataaactgcctctgaggccatgtgaaataatgtggccattgggaaggaaggcctctaggaagggaagggaccacacaaagtcaccgcaagatgtttcatcattcttggccatcagacacttgatttctggacagtgggacctgtaggattaggcacagcaatttggggcactttttttttctttctctttcttttttcttttcttctatttcttttttaagccatgagccaagttattaatgggcctttggcagagaaaattaatttctttatttcctaattaggaagaagagcagagactgtactagctttggtggcactggttcagcacagagaaccttgggctgacctcggggtgaacaaattcttttttcaacttaaaaaaaaaactctcttatattttagagtattaagtgagctcagaaaataaaagagataaggcaaagaaaggaaacacaaaaaacaaaagtaaactgaaaaatagaagaagacgataaacaagtgaagttttggtcaaggcactgtccttatctttcactaggagtggtggaacatagaggcagtatctggatggagcggttccattgtgatgatttctggtggccaaaacaggcagctagtgcacgaaagccatcttggtaaaaaaaaaaaaaaaaaagatctaccttcatattccaggaggacatacttttttgatacgacaaaccatgtcgtgctgatctaaacatatcagtcatttacactttagtgtgaattacttcaactgggtttattcttagatacttggctgagatcatcagccagcttcctgatacatggggtgggattcctcagaggataaaggggcttgcatctgcccagtgaccaatgggataaccggttttttggtaaatttttctttccataagggagcttcttaaactttaggtcctggtactccagaggcacttacatcctttcttgaaggctgccttgtgcctggtctttccatttctagcaatgctaatgatgtctgcaggcggatcacgaggtcaggagatcgagaccatcctggctaacatggtgaaaccccgtctctactaaaaatacaaaaaattagccgagtgtgctggtgggtgcctgtagtcccagctacttgggaggctgaggcaggagaaccagggaggtggagcttgcagtgagctgaaattgtgccactgtactccagcctggggacagagtgagactccatctcaaaaaaaaaaaaaaaaaaaagtagataattccaaataaacctgtttggacctatgtaagaaaactaaggttttcttgttcactctatttttttagagatgaggtcttgctctgtcacccaggctggagtgcagtggtgtgatcatggctcactgtggcctcaaactcctgggctcaagccatcctcccacctcagcctcctgagtagctgggactacaggcatgcaccaccaagcctggttaatttttcttattttttatagagtcagggttgtgctgtgttgctcaggctggtcttgaactcctggactcgagtgatcctcctgcctcaacttcccaaatagctgggactacaggcatgtgccaccatgcctggctaatttttaaatctttttctagaggcagtgtctctctgtgttgctgagctggtctcacactcctgggctcaaatgatcctcccacctcagcctccccaagtgctgggatcacaggcatgagccaccacatccggcccaccttttcactctttgtatctgaattcttttctatgtcctcttggaaggaatagattgggcattggacctaggctggggacccagttccgctcactaccagagatgtggccttgggcaagttacttcccctctgggagcctctgtttcaccctctgggaaatggtggtgatgatcattattgtcctgcctggctcatggaactgcggaaaggtcaccatggaacgtgtgcatagatgatgttcccgtgtctttcagaggcgagtctggagccgggaaaaccgaaaacaccaagaaggtcattcagtacctggccgtggtggcctcctcccacaagggcaagaaagacacaagtatcacggtgagtggcagttcccaatcagaggccatgatttagccaaccggtctccagcttgcagcccaaccgagatacaaacagaacatcattgcaagaactcaggccccatctgactacccctcccctgaagactcaaagagggaccgtctttttggcgagcaggcctgttgagtgtgggtgatttcttggctcagctagaagcatccctccagaagggggcccgttttgtgaaatgagaataagccctttccttccatagcgagatcttcctccacgtcggggcttctcagtggtggcactgatgtcattttggaccagataactcttccttggaggggcttccctgtggctcgtagaatgtttcacaacatccctggcctcgacccgccagatgccgacagcccccttccctccagttgtgacaaccaaaaatatctctagacattgtcagatgttccctggggtgggacagttgcccttgattgagaagcactcctttcatgaatctctgtaacgtcccaggggttaaggtaccttttgggttcccggattcctccacgtgtccccctgtccctgggatggagatgctggtatcactcggcccgtgggcttcagtgcaatgccattcagtaactgtggattgagcacctactgtatgccaggaaccacttggggtggggacctggggataagtctgagagatgctgttattctcttctctgagcttccagacctgtggaagagcatgtagttgtcaaagaatccctcaaataaacagatgatgacacggtatgactaagagcttgggaggaaaagaagagcaggtttctagagtcatcacctctagggcccatccttctcttcctcctcgtgtgtcagccctgccccatctatcccacaggagggggcacgtggtagggccgctaggactggccggtgcctccgtctgcaggtttgtgggtgggaagatggtaggatggagatctgaccacggcatggggtgtctccagtgttcgccattccagatgtcactttgcgtcctcagaggggactctggggcagccaccatggccggcttgtctggaggcccttggagatctaggatgggcgctggtcgtggctttggagaactttccttctccaaacaaatgcaggaaactcaagattcagcatcctagaattgtctctggcaagttggtttccagccatagtgagtgggaacaatggccccagaggctgtgtggcagtttaaacacagtttccactgccttccctttccctaaagagtaaacacaggagataatactttctaacaactcatcgttatcaagggcctactatgtgctgcttgttttggctgcatgcgtaaacacatctcagacattgtctcactggatactgttttaaggagcctaatgtggccccagtaattatgaaaacctttgaaatgtctggatctctaagaaattagaaaaaggagggaatggctgagcatgggggctcatgcctgtaatctgtgttttgggaggccaaggtgggaggatggtctgagcccaggagttcaggaccagcctgggtgacatagtgagaccctgtctgtaccaaaaaaaaaaaaaaaaaaaaatcaagagaattagctgggcctggtgtgcatgcctgtagtcttagctacttgggaggctgaggcaggaggattgcctgagcccagtaggttgagactgcagtgagctgtgatcgtattcctgcagctaaacagagagaaaagaaacagtatcaaggaaaaggagctgaccagtctgtctgggagactccaggctgtttggggggatcaaagtcatatattctccagcccctgatgtccatgtgatggaaataacgctgacatttgttttatactgtgttgttcaaccacagcaaggcccatcttttgcctacgtgagtaactgagagtgttttcctggtgtgtaggggaggcacggagtgaacttagatctgcatgatcctcttgcacccaccgagtcccgtagctggtggtagaaatggggtaggccctagagtttcacaacttaaatcagtaaatgcaccaaaataccatcctgtgggtgtctgatgccagggaagggtgtgggggtgcatttaccacccacgggacgcctattggagtccccagggttgcgctccagcctgaaatggatttctccggttcagaatgaacccctgcacccttcaaagcatccgctcctggtacccttgactggaacaacctagacagagatgtctgtcccatctggctgagtgttttaggactgtcaggccccaaagcttccctggctcgatggacagtcgatggcacagctgtggcatgcctccctcttctctccctgccatcatccctaagtgtcttccctcagccctgtccctggtgcaccagtgtgtccctgtgcatgcgtgtgcagtgcgtgtctgtctcttgcatgctggttgcttgactcaagcctccagaaacagtcttggaggtcgcgatgcactagctttggtggcgcggtaaggccccagctacgcaacgcataacctggtcctgcttggacctgtgcatatgtaaactcatctctaacacagagcttggggggctgatgtgtgggtcccagcctagaagaaacccacaggtgtcttccttggctcccgaaaagatcattcaatccatcttagttagaccctgggtgactgtgttgcagatcagaaggagaattacagttcttatttgggatctgcttttgtgtgaccttggccgagtcagttaactcctcggggctatggtttcatcatctataaaattgagggtttgaaccaggtcccccgatttaaagctctcttgccaagacttttcaaccttacctgccagaatccccattctagaaagggagcctttttcagagagcatggagaccccaagtttatgtgaacaaaagtgattcctttagtcgtcttcccaccaacaaagaaatgcccgtggtgctccttgtaaatttccaccagtctcagctgtggtgattccacttgtagctgagatttgtatgcggatgaggcttttgcttcatctttctctgggagctacaaaaaggaggatgtgtggacaaatcaaaacagaaacaaatagcagcttcctgctttgtcctgtagaccaggtaccctgatgccttcctagcatgcggaggaatgaggaggaagccatgcccatccttgtcccctctagacactttcccggctcctgtccagcccagccctgatgcctggaaaaataaggaagggaaagcaggaggggaggacaaggagaaaaactcccagaatccagggcctggaggcctcggggcccaactgcagccgccatgttttagggctaggccaagagcagctcgtttgctttcccagcttaacttaccacattggccctttcctgccatgattaatcacgtgaccgcgtttgtgcaaaggcatcccggcagagggggccggtgggctgtgtacagtctcagcttcctttaacccaatgaatggagctcaggcaacctgctttgaagctttattccgcagtccgctaagaggattcctggtgggttttgtgcattccttacttgtctgctgtagaagacttcagaaaaccagtcctgagaaagaaaaaattgcaacttaaaaaaaattgcactaaaataattagaaggaggcttgtagtggtttaacttgaagaaggctgcttgttaaacatgaacagcagcacgactgccatgtacagtgggacaggtggtgcactgcacaactccggggggcaccattcatcatgatgtaaatgacatcaccgacattgtgcaaggcagtggctttgagtggcagtgatgttgcacagatgagcaggccctggtcttgaaaaaagtgaccttcctagggagcagatgtcctagctattagagagctcagacagttgcttctcttctgaaatcctcctgtaaatctgaacattagcatcagggtctaagaggaggtaggagataggagagaacctgtgggttaagggcagagttttgtgacaacatccatccaaggtagaactgtcaggacctaggttgctttctccaataactagatgtgaatgaattttagggagagctggaaaagcagcttctacaagcaaacccgattctggaggctttcggcaacgccaaaacagtgaagaacgacaactcctcacgattcgtaagtagcaaagccacatggattttccagaaaagctttggtgtcatctcctgcctggggctgcagagtgtttgcgtgcagaggtgggaggggcatctgaccctggagagatgggctgtatctcacaatcttgcaagggctcctgcctctcactctctcattcattcattaatttattcactattcactcaacaaatattgattggcctggtgcggtggctcacacctgtaatcccagcactttgggaggctgaggtgggaggatcacttgagcccaggggttctagaccagcctgggcaacaaagcgagatcccatctctattattaaaataaaatttaaaaaattaggtattgagcacctggtatgggctagacccttatatccgataccattttatgtaacaaaacatgaattgagtgccaactgtgtaccaggcacacacctcctccaagaaatacttagtaagtacctactgtgtacaattactctggtaggcacttttacatgtaccaccattctctttgtttttttctcatttgctgtttttattaagtgcctactgtataccaggcactcagcgagtctcacaggattgcgatgaatagttcagatatggttccagccttcatgaagctggttcttccaactgaataacagagagtaagtgaggcagggggtactaccttcccatgcacactcccccaggctccaaagcaaaaagtttttgcctgagcccaacagggcaggggaactctgaaagtggatggttgatgataggtagacaacaatggttttattgtgcaaaagaagcggttgtctccgtaggagggtcagaaagatattttagtgagaaaagatgaaggaaaaattgcctctgcattccaggagaagggggtctctgaactgttgctcgctgagatggggccctgtgaaagactctttgcagaaagctctgctctgctgagcaaatgcacatggtggtccctgaccctgtgatccccaaggcccattttagtaacaaacaattacataatgtctcctttcctcgcccgaaattagaatcatagatagtatcacctcctacacgtattagatgaatacacatcagcataatgccctaactggaatatgaagaagaaataacataagacaattcataatgaaagtgtgcatttcaggccaggcgaggtggctcatgcccgtagtcccagtactttgggagactgaggcgggcagatcacttgagctcaagagtttgagaccagcctgggcaacatggggaaaccccatctctacaaaaataaataaataaagtgcatttcagcatatcaatgctcgggccaggccacaccaacagaagacacagtaagagacagacacttaggtctatccacggcgacagctacaaatacaaggaaaagggtcaagttcaggcactgatgatgttggcatgggattttccagaatggcaactgactctcagtgaagcgctgaaccaaagaacaatcttctctagagtcacacagatgggatattcttgtattagaacaacattttaaacacttgttaatgctttcatttaaaagcataaaaatctagaccaggcacagagtggctcacacctgtaaacccagcaccttgggaggctgagttgggaagatcacctgaggtcaggagtttgagaccagcctggctaacatggtgaaaccctgtctctactaaaaatacaaaaattagctgggcgcagtgacacatgcctgtattcccagctactcgggaggctgaggtgggagaattccttgaacccggggagatggaggttgcagtgagccaaagtcacaccactgcactccaacctgggcgacagagtgaggctcttgtctcaaaaaaaaaaaaaaaaaaaaaaaagcgtaaaaatctaaagtcataaaggttaggttctaagcctggctaattacaaacagatttttacctccatgagtggcaggtgagacattggaagagtcataagggatatagacaaggattggcatcagagactctccaggtcattgcaggactcccaaaatatccttggccccactgttcactaacaacagcggcccccccccaacatgtgacaagccaaataatggcttccaccgatttccaaaatctccatagcagatgtgccgcctccactgagaagcactgcgtttgcatgttccaattctgtgcaatgtttctagcctgtcataaatggaagcacgtgcaagacaaatccctaaaaacatcctccactcactggcgtccctgccatcttgggaaggagagtgaagaaggtgcctgggccttgcctgtgaccagccggctctccctggctccatctgggatatggtcatcccaaatcactctactgcatgtttcccaatggggaaagtttgaaggttttgtcaaggactgagcaagcctaggggattgtgtccacacacgccaacacttcccaccatgttatgtcatgatgggggaaaaggatgaaatcctgtctcacctgttgaggaaacaggaaaagggttcatgccaacagatggaggattgggttccatccttggtttcatggcttagctgaggcaggtagatagggccatctttggagatacttgttgagcctctagggccaggaacatgagccattcctgcctaaaggacatcctacacagggcctgcttgggcagtgtggccaatgcatactcacctgtcccacagaaaaggtttaatccatagttggatgatgtggatgttttggagcagggtggggtctggggagggagccctctagcccctgaatatggaaaaaccttctttctgcttagggccctacctctcaggagcaacgtcacgttggacaagtcacttgatctcttttagccttagttttcccagctttaaaatggggatagtgggctgggtgtggtagtttactcctgtaatcccagcactttgggaggctgaggtgggaggattgcttgagtgcagcagtctgaggccaacctggacaacacagtgagatcctatctctacaaaaaaaaatttaaaaattagccagatatggtggtgcatgcctgtagtcctagctgcttgggagggtgaggtcatggggaaaaggggattgcttgagcccaggagttcaaggttacagtgagctgtgattgcaccactgcactccagccctcgctgacagagcaaaaccttgtctctaataaataaataagtttttttaaatagggatagccatgatggactacggtcattgcaaaagccgaatgaaattgatctgtgaacatgttttacacgttctgttgctgtcaggcctggggtggtttcagctcagcagatgttggttccgcctgacaacttgacctgtggggttctgagtgttcgcaagaatctccccgccccacctcccatcctctgtaccatctgcctcctgcttgcccacagcatggggttaacggctgaagttgggcagcaaagcctgaactgtgttttcctgttggcagggcaaattcatccgcatcaacttcgacgtcacgggttacatcgtgggagccaacattgagacctgtatcctttccctgagcctgggccaaatgggtacccctgccccctaccaatctcctgcccagaggctgggagagtccaagagccacctctatctttccagcctcttaggtttcttccagaacaaatctccccttaacagcaggcattgtggtgcagtggttatacatgtgtggaccggacccctggtttgaaccctaaacaagcagcctaggctgcatgtgatgctcaaatgatctgtcccttagctgagtgaccttgggctggttactccacctctctgtgcctcatcagcaaaatggggatgataatgaatggtacctgcctcatagaaatgtgagaatagagtgaatgaactcatataaagctctaggcaccatgcgaggtgcagagtaagggctggctacgtagtgtctatcgtatgatcttcacttcatccttattcagccattgtccgaggccaaattctggacctgtcgtcctcttagagagttggtctgtgatcggctccacttcttaggtaggaaattgatgaaaacagagtttacccagaagaatgctggtatcgcaaggaacaagtagagcatctctttcatgaacctgagcggtgaagtggagccaagttagaaatttctggacgtgggggaacaaccaggtctagagttcagtgactgatcagcctcaggagctttgcaggcggccctagggctcaggcttcctgtggaacacgtgcttggcaatgtataggacctgggggcctgacttagcttctttctgcacctgaggtcctctagcagcacctagtggtcccatttttccacgttatgtgccctggataagagggtgggttgtggagtagcttcctctccactgtacttgtctaagctgtggggatttgggaaaatcactgaagctctctgggcctcagttttgcctcggtaaaatgggggtgattgcacctagtttctggagctggtgcaggggttaaatgaaataatatgcataataatatgcacagcccttggtacggtactgggcccaaagtgagcatctcataggtggtggctattgcgttaactcaatgttttctacgtttctactttaatctgcccaaaccagccaggattcccatcctgcagctaggagggctgtcaggcttcggtcaagtccagagccagggccctcttgtcctgcagccctgcacacacctctcagcaattcatttcctgtgtttagagcgagccccaggcatagccccgtccttctggcctcagccttccttttagatcagtggttctcaaagtatgtttccaaaccagcagcatcagcatcacttgggagctctttagaaacacacatctcagccaggcacggtggttcacgcctgtaattccagcactttgggaggccgaggcgggcagaccacttgaggtcaggagttcgagaccacctggccaatatggtgaaaccctgtctctactaaaaatacaaaaattatccaggcgtggtggcatgcacctgtagtcccagctactcaggaggctgaggcaggagaattgcttggatccgggaggcagaggttgcagtgagccaagatcacacactgccctccagcctgggtgacagagcgagactctggctcaaacatacgtgcgtgtgtgtgtgtgtgtgtgtgtgtatgtgtgcgtgtgtatacccatgtacaccatgagaaagtctgagaatcactgctttccagattggacatgggctgtggtagcccgggcactgctagctggctttaggacttgaagaagacaaggtctgctgatctagccccatcatcccgcaccatcatgcttagtgctgtggaaatccacccagtacagtagcccagcctcccagctgccctctcccatcaccccggaccctgtgatctccatgccaccctcacctgccctcccctctgctctccctcctgccaccccgcatcgcggagaagctctcctgaaattaattagtgtggcgtgtttacggtctctctcgcctccatcccgtcagaccccactcttggaacagagggcatggaagacagctttgccacttgttagctgtatcatcttgagaaaggacttctcttctctgagcctcagtttccccttattgaaaacaccgataatagttgcacttatttcctagcatactttgtgaggcttcagtgagacaatttatatcaatcatttcacacaggaatgaatcataaatcataggatcatagatggtgtcattatttgtattctgtcatgtctgaagacagctcattttaaagaagatttgctggtgatggctgttaggggaacatctcgttaccattaccttcttcctggagcctttttatgctttttcttttcactctattcccctcccttttttttgcatctgaagtctgctggcagcacccagcggttccatttgtccataggggcaatggtcaaagttagacattaccgatcccaggggtagaactggaaagtcatcccatgtgaattgggtgtgacagggatggaggtggaagaccagaggaacacccgcagtatccccagaatccctaactccctccaaaccagatctgctagaaaaatcacgggcaattcgccaagccagagacgagaggacattccacatcttttactacatgattgctggagccaaggagaagatgagaagtaagtgactagcaatgacatgtgattggatggcttgagccttccctttcatcagaatccggggttaagggattggctattaaaacagtctcagatcctgccagaaaggaccatgtctgtgagtgacatatgaacagttcttcatctcctcccaatgagtgagtgtggcttgtgttcagtcattctcatttactgagcacctactatgtgacatagtagccatcaactccaattagacattagatcattaatgattcatgtctcattagaccagagagcatcaagtccaactagacacaatctacgccttcaaggaaagggagaaagacatttgccttacttgccaatttataaaacttgcaaatataaaagatgcattctggttttataaggaatttgcaggggcagcaggactaagcatttttcattatacatgttttgccagtgactttgtagaacaggggtcaagactttttctgtaaaaggccagatagtaaatcttcaggctttgcaggccaggtggcttctggcacagctattcaactctgccattgtaatacaagagcagccacaggcaatatataaaccaatgagtgcaggcaacacataaaccagtgagctcaggcaacacataaaccagtgagctcaggcaacacataaaccaatgagcacaggcagtacataaaccaatgagcacaggcagcacataaaccaatgaacataggcaacacataaatcagtgagtgcagatgcatcactgtgttacaataaaactttatttacaaaaacaggcagtgtgcagaagtttgctgacctctgttgtagggaaaagtttttttatgtaaatataatacactgtataccaaactccagtaggaagttatgagttctggacctgcagctgtttactaactcttaaaaatatatacaaatcgcatagcttaaaaaaggaatggatcagtgactatctgtacatagtagagtctacatgttagtaataagttttgagtctgaaattctatgggaacaatacagactttgcttcccatctcttttgtggcccaaggttagttattttggttaagacagttaccaaaaggatctgtgtgagctcagaacttcgctgtgtcggagtgtattgtagacctcagctactagggggtggcattatccattatttaaatttccagggtggggcaaagtggctcatgcctgtaatcccacactttcggaggcagaggcgggcggattacctgaggtcaggagtttgagaccagctcggccaagatagtgaaaccctgtctccccaaaaatacaaaaattagccaggtgtggtggctggcgcctgtcatcccagctacttgggaggctgaggcaggagaatcacttgaacctagaaggtggagtttgcagtgagctaagattgcaccactgcactccagcctaggcgatagagtgagactctgtctcaaacaataaaaataagtttccttaatggctggctttcaggaacataggctatgaggtggagcaatttttggtaaagggggaatgctgaatggattttttatgtaccagcaaacatggtatattagcagttacagtgcaggaccctgtggaatgggccagggaaaaatgttgacattccttttccttttatttggcacccaagaaaacagtttggttgtttggtaccttgggttccagttttgtgctttgcctctggtcttccagaaatgggcaagtatagggctcagaactaaattcccaggggccgtttgtattctagatgatagaactggaaagatgttaggcttttagaaagaaccaaatattgctaaatgcatccaaactcgggataatgaagtcttggcaaagacctcaatcctcgtgacttgaatcaggcatttcaagttaatccaaaagtttgagttaactggtgccttcagtcaatttaacctcgagtttatcaagcagcttccaagtgacttgacccataaaagaccttgattttgaaagaaaaatatcttgctgacgtctctccaaaagtataaccgaatccatcctaattaaagattgatctggaagaggatccttgatgtattggagggtataataaaagcaaatggtgcaggagaaagaaaggcaattataaagttgggggtgggggagaagctgaacaacaacaaaggaaatgtaatcataggatacagtttgacacagaatatctaattaatgtcataaaaagggagttggcaaactgtttttgctaaagggtcagtagtaaacgttttagactttaaggaccagatggcctctgttgcaactactcaactctgttgcctagtgagaaagcagccatgagaaataaacaaggacatcagagcagctgtgtttcaataaaactttatttacaaaaacaacaggggaccagatttgccaacctgtgatataagccttatatattgattcaactaaaaatagctgggggtggctgggcacggtggctcacacctgtaatcccagcactttgggaggctgaggcgggtggatcacctgatgtcaggggttcaagactagactagccaacatgatgaaaccccgtctctactaaaaatacaacaaattacctgggcatggtggtgggtgcctgtaatcccagctactcgagaggcaggagaattgcttgaatccgggaggcagaggttgcagtgagcagccaatatcgcaccactgcactccaacctggacaaaggtgaaactccctctcaaaaaaaaaaaaaaaaatagctggaggaaaggaaaggtagtataagaaagctgcatttttgcctaccatagcaggaagtcactagatactatctaaacttgacatatccagaaatcgcctattacagcgattgtgctttgcctctggtcttccaataggccaaaagcacctgttacttttggcactgaggactggtttcctggaagaaaagttttccacagactgggcgggcagggttggggggatggtgtggggatgattcacgtgtattacatttactgtgcactttattattacattgtaatatacaatgaaataattatactagtcaccataatgtagaatcattgggagcttgttttcctgcagtcccatcggggggtgatgggggacagtgacagattatcaggcattagagtgttataaggagggcacatgtgcagctcacgatagggtttgcgctcctatgagaatctaatgctgctgctgatcttatgggaagcggagctcagacagtgatgcaagcgatgggcagcagctgcaaatagcggataaagcttcacttgctcacctgctgctcacctcctgctgtgtggcccagttcctaacatggaccggtactggtctatggcctatgggttggggaacccttggcctatgatatgtaatacataatggtatatacattataataggctagtatatatagcaagcctattgtacagagagatagtggtaactgccagataaaaagcagctaaaagagataaaagcaggtattatggagtaaggtagagttggagaagggatgtgacaggagaatgctatttttcattataaacctttggtagtaattgatttttaaaactcatgtgcctgtttgaatttgataaaaattttataaatacatgaataaggccaggtgcggtggctcacgtctgtaatcccagaactttgagaggccaaggtgggtggatcacctgaggtcaggagttcaagtctagtgtggtcaacatggtgaaaccccatctctactaaaaatacaaaatttagccgggcgtggtggcgggcgcctgtaatcccagctactcaggaggttgaggcaggagaatcgcttgaacctgggaggcggaggttgcagtgagccgagatcgcgccactgcactcctgcctggacgacagagtgagactccgtctcaaaaaaaaaaaaaaaaaaaaaagagtaaaggttgatctaactcttctgacagctttgtctctgaaggctgaaggcagggtgcctctagacaattgaggtaaaggcatcccttcctccaggtaaatgtaacttcgtgccagggattgtggcttagcaagcagaaccaaggctggatatcagctgcagtcactggagcagtgcacaacctgcaccgctgtgtaaggctggcagtggttggtgaggctgtctacgtgacgatgcgtgagggctttaaacggttcaagccttgataaagggaaaggaattatgatggcccagacccttgaccagatctcggtctcatgttgaaattagaagtatgtcttattgaccctgacctgtcttcctctccttctaggtgacttgcttttggagggcttcaacaactacaccttcctctccaatggctttgtgcccatcccagcagcccaggatgatgagatgttccaggaaaccgtggaggccatggcaatcatgggtttcagcgaggaggagcagctatgtaagcctcacaccttgagtctggagggtagcttgcctggataccagtggaacctgttaagaactcttctctggtcaggacagatttctgctctctgaattccccaccttccattaaaaaaaaaaaaaaaaaaggaggaaaatgaattttattctaggtggtttgtttgtgttgtagaaaagtggctgtataactagggttgcaagtaacccgagctggcttaaaccaaagggaaagtgactaactcagaatgttgagaagttcagggaggttaggcacagtggttcaggtctgtaatctcagcgctttgcggggccaaggtgggcggatcactttaggtcaggagttcgagaccaacctggtcaatttggtgaaaccctgtctctactaaaaatacaaaaaaaaaattagccagggctggtggtgcacacttgtagtcctagctactcaggaggctgaggtgggaggattgcttgaacccggaaggcagaggttgcagtgagccaagattacaccactccactccagcttgggagatggagctagactccatctcaaaaaaaaaaaaagttcaggaattcaagcttcaggtacagtgagatctaggtgttcaaaagatttttctagaacctaatttcttgtcttctatctctctcgactacattgtttctctataggatgcagtttgttgacagcaacatagctgggttccagcccttatattctttgggtttatgtccaaagaacagagtagattcccggcttaagttcctgaatggagtgtcattgactctgattggttggcttaggttgatatgcacattcctgagctatgcagcataggcagggttgtggaaagcgcagggtggtttcattatggtccctaagaatggattcttggagctgaaggtagagatgttggcctcatcaggaacatgtgggcagggtttaggggagggggagtgatcgaggcagtggatttactcaggcttttcctggaggggttgctctggtgatcaattgatattgatcaaaatcatccaaccaatggccaagaaacacactgggtcttgagaacaggacagctcagaaagaaattcttggtcgggacactgtgtttccagaaacgattttccttctgcgttagatgtgcctcagtgttgaaggttaatctctttcaggaacaccaggacagaactgtggaaagtttcccttccttcccacgcctacgcccgtttggagccccagaatagcactgaggttgctgaaatgctgcataaggggaggggcagctcctccgaagataacttggggtctggaaaattaggctgtatgggtcagttgacaaatggatggtgtatgtgggtcttggccagggtcccacatcagaatctagtgctgatagcctccttgtctgaatgacataggccctccaagaatgattcatttcatttgggacaggggtcagttttgcttctaatcttgcttttaaataacaatgaacaatggttaagtatttgctgtgtgccaggaatttaccaaatccttttttcttgatgtactacactgttcagtatagttttatttaaataataaaaaactggaacaggctgggcacagtggctcatgcctgtaatcccagcatttggagacactgaggcaagaggattgcttgagcccaggagttcgagaccagcctggataacacagtgagactctgtctctacaaaaaaaataaatagaaaaaaactggaacaaactaaaataggttgattaatagagggtttattaaatcattgtctgtccttgtgaaagaaaacaatgagaccatttaaattgttttgctgggcatggtggctcacgcctgtaattccagcactttgagaagccaaggcaggcagatcacttgagcttgagtttgagactaacctgggcaacatggcaagatcccttctctacaaataatacaaaaaattaactgggtgtggtggtgcacactgtagtcccagctacttgggagactgaggcaggaagattgcttgagcccaggaggtcgaagctgcagtgagccgagatcacaccactctgtcacctaggctggagtacggtggcgcagtctcagctcactgcaatctctgccttgcaggctcaagcagtcctcccagctcagcctctcaagtcgttgagactacagacatgtgctaccacgcctggctaatttttgattttagggtttttgttttgttttgtttgagatggaggcttgctattgtcacccaggctggagtgcagtggcacgacctcggctcactgcaacctctgcctcctgggttcaagcaattctcttggctgagcctcctgggtagctgggattataggcgcccaccaccatgccccactaattttttttgtatttttagtagatactgggtctcgccatgttggccaggctggtcttaaactcctgacctcagatgatccacccatcttggcctcccaaagtgctgggattgcaggcatgagccaccgtgcctggcctggggttttttgttttgttttggtttgatttttggaggggtgggtagagacaaggcttcaccatgttatccagtattctctggtcttgaactcctgggctcaaacaatcagcccaccttggcctcccaaagtgctgggattacaggcatgagccaccatgcccagtccccagtgttctcaatgtactttggcacttgtttcccctttaaccacagagaccagactccaggcccagcaccttcggcagccccaagcatctagctagaatttggtaatactgttttccttgtatttatatttataattgccatctatttatggcaagtgaagatgatttgtcactgaagatagagaaagttttctattaaaacaaatgtaaggaaagagaaggaagtaaatttaaagaaaatgattaagcaaataatggagcagatggtacacagagcaagcattcagacgatggcgtgcaaatgacgaactctcataggaaccaacttagtcctaaatgtacaccaaccccatttataaaccaagagctacttccaaaccctccatcaaggggcctatggagaagggggtgggtcaggcttcaggctggagcttcatgaggctccaagtgaccaggggacaccaggattttccccaccacattgggttctgcagccttgaactcctggcctcaagatatcctcatgcgccaccatgcctggcctggttatactgcttctaatgtattttgaagataaaaaataaaatcacctaaattgtccatcctgtgtatccctggtggtacacatgtctgatgttggaaagtcctgtttcttattcctcagcaagaagagaggtgtaaggccactgtaaaaaattagcacaaacttgatgccttaaaacaacaggaatttattctctcccagttctggaggccagggttctgaaatcagggtgtcggcaggagccgggcataatggctcatgcctgtaatcccagcactttgggaggccaaggcaagaggatcgtttgaggccaggagttcaagaccagcctgagcaacatagcaagaccccttctctactaaaaatttaaaaaaaaaaaatttttttttttttaaaagacaagatgttggcaggggttgttcctcctggaggcactgagggagatctgttccttgcctctgtcctggcttctggtggctctggctgttcctggcttttccttggcttgtctcactccagtctctgcctcatccttcatgtggcattctactctgtgggtcttctcttctgtccatcataaagacacttgacattaaatgtagggcccaccaggttaatccaagatgatctcatcttgagatcttgtacttgattccatctgcgaagaccgattttttccaaaataggccacgttcaggctgggcgcggtggttcacgcctgtagtcccagctctcagggaggcagaggcgggaggatagcttgagcccaggagttcgagacctgcctgggcaatatagtgagaccccggtatccacaaaaaggaaaaaaaaataaatgtaaccccccaaattaggccacattcacaggttccaggtggacatattttagaaagaccaacattcaacctaatataggtggcttccactctttatcacctactaggccaggcccttgctcagcatcttacaagacctaaacttcacgaagcaggtactactgttaccatctccgttttgcagatagggaaactgaggctcatgggacttattgagactcatgtagagtctctatcctctattcatccatgattcatccatcaatccatcctctatcatccatctatcctctactcatccttccatcacccatccatccatcacccatccgtccatccatctacccacccatccatccatgaacccatcctctatacatttatacattcatccatccattcaccctccatctgccatccatccatctccctccctccccatgtgtatctggacccggaactaggatttggaaattcagagataatgagatttataagaagcaaagctgggatttgaactcaggactctctaactgcagagcgcgtgctttgcaccagcacaccaggatgctgccagccgtcaccacccttgctgtgttgtgtctcctcactggtttacttctttgctgtctgctaattctgccccaaggttcatctcttatggcctgggagtggtggcattcttttgtcatttctggaattacatttaactataccagaaagtgcaaaccaatggttcctgagcccacaggagagatcggccactacaaccttcaaaatttttagaaattggttcctaaagtttaaatatgggtaggccgggcactgtggcctataatcccaaccctatgggaggccaaggcacatggatcacttgaagtcaggagtttgagaccagcctggccaacatggtgaaactccgtctctactaaaaatagaaaaattagccgggtgtggtggcacacgcctgtaatcccagctactctggaggctgaggcaggagaattcccctgaacctgggaagcgcagaggttgcagtgagccgagattgcaccaatgcactccaacctgggtgacagcaagactcagtctcacacacacacacacacacacacacacacacacacacacacacaccaaaaaacatgggtacacttcacataaaaactctgggtttccattatctagaaaaatcagaagttccagcaacacttggcttatatcccctgtggcaatgacggagtagctgctggccccttcagatgggtttgtggcctccttgggtccccacagtcctcattagttggctttgttcatttagaccagtggttctctgccagaggtgagtttgcctcccaggggacattgagtagtatctggtgacatttgtggttgtcacaactctgtcagggtaaccaccactgacatctagtggttagaggccagggatgctactaaacttcccatgatacccaggacagctccccacaatagagaattatctggcccccaatttctgcagtgacaagattgagaaaccctgagttggccggctcgcctgggctgtgcaggcatttcaggaatctttagtttaaattgacacttttaaaactgtgagtgcaactcttcatagtttacaaagactctttcatagatgttatggttaaaaggaagtgtgtttccaagccctgtcaacagcagcttcattcattttggggagaaggctttctaccatagtaagtgggagcaaatggatgggtggtcagcagctgggtccttttgctgagctgggccagggaccccatggcgtgagaatagctgttgtgaagggccttgtaatgtctggtttggcctgaggaaccagagaagtctgggatctctaggctttgttcctggaacatagtgactgatttgaagccagaactctgggtgatttgtacctgagttaagctaagccaagaatttgcattaatcatcatccatccattcatccatctaccatccatccatcatctgtccatccatccattcatccatccatcatccatccatcaatgctgtatccattcctccatcaattctccatccatctatccatcgtctatccatcaatcctctgtccattccatctatccatctatcctctatccatccatccatcatccgtctatcctctatccatgaattattcatccatcaatccatcctctattcatccatctatcctctactcatccgtccatcattcacccattcatctacccacccatccatccatccgtccattcatccatgaacccatcctctatccatttattcattcatccatccatccaccttccacctaccatccatccatctctctccctccctcccatgtgtatcaggaccttggaataggctttggaaattcaaagatgattagggcaggccctccactctccagaaactcatggtcttatggggatttcagacatagaaactattttaacagtaacatggcctgagtatggagtcagaaaggttccaagtattctgggaacacagcgtttttgtttggagacacctggacaacaagtggaaacaaatgtatatcttcttcatcccaacatgggcatctgttacacccagaagagtatgtaagaagcacagggtttttatttcaaaaatccttttattgacatatgatttacatggagaaaattgtgtatgccatagcgtgcagtgcaaagaattattataaactgaacacgtctgtgtaactagaatccattttaaataagacaatgccaccagccccatggaagctcccacatgcaccttctaagaacttccctcaattaaggataatcattatcctgacttctaacagcatcgattagttttgcctcttcttgaatggacggtctatatatggacttagacagtatgttcttgtttccatctgtcctcttttgttcggtatttgtgtctggaagatatgtcagggttttttttttgttttagagacaggatctccctacattgcccaggctgtatcaagctcctggcttcaagcagttctcccacctcagcctcccaaagtgctggggtcgcaggcatgagtcactatgctggccccaatacatcagttttgatttgtggtagttgtagctcattcattctcactgttctgtggcaggggttgctaacacatttttctgtaaagggtcagatagtaaattctttagcctttgtaggccagacgatctttgttgcaactcattaactctgccagtgtagcatgcaaatagttacagacaatatgtaaatgaatgagtatagctgttttccactaaaactttatgtataatagcaagcagtgggccagatttggtccatgggctgtaatttgccagtccctgctgcgtggcattccattgtaatgcaaggttttaagcaaccatatgaaaatattgagctcagaatctagtttcttcagaggaaagatgtaagctggctctgggtccccagtggctttaggctccaaaactccagggtaccttggcattgacctttgtgtctgctctgcccttctctccccacctcagccatattgaaggtggtatcatcggtcctgcagcttggaaatatcgtcttcaagaaggaaagaaacacagaccaggcgtccatgccagataacacaggtacttgccactttttcctgatgaccaatgactttggggttgggggggtgggggaggtgacatttaaccactggttatttttcaaggtgaaggtatctgggattttaacaacagttggactaggttcttatcactcactttttcaaacttttcagtgctcaagaccctatgtggaaagttattgaatcagagcgcagggattaaaaaaaaacaaacctaatagttttatttatttgttcttttttttaaatacaaaattttacaagttttaatagagacgaggtctcgctgtgttgcccaagctgatcttgaactcctgagctcaagtgatcctcccaccttggcctcccaaaatgctgggattacaggcaagagtcatcacgtcctacccctaatagtgaccagacaagatcccgagggaccatctcttctaaaataccccacttaattgttttgttaaagaaatatttctcaagcccctgcaatatgccactgggatacagcaggaaatgacacaagaatagctcttcttacggtatctgtggtcgtcttggggagacagacctcaattgccctgagaattaggggtgccagataaaatacaggatgtccagataaatttcaattttaggtaaacaacaaacctttttttaaattttaattatgtcccttgtaacatttggaccgtgattataccaaaagagtattcttgtttatctgaaattcaggtttaactgagcatcctgtaattttccccctaaatctgataaacctacccacaaataaacagtattttgtgttttgagaagctggcctggctaccactatgcttgttggtggctgagctgagagcaaaacttaggtttcttatttcccagcccaggctgtatattgtgttgctttttcccgctccctagagcccaccttgatcaaacctgttgcaaccgcttactgggtttaccttgcccacagcctagacagagccaattaatcaagacaggggaattgcgatagagtaagagtaactcacgcagagccggctgcatgggagaacagagttttattattactcaaatcaatctccttgagcattcgtggatcagagtttttaagcataatgtggttagggggaggccagtgagttgggggtgctgattggttgggtcagagatgaaattacagggagtcgaagctgtcctcttgccctgagtcagttcctggacagaggccataagatcagatgagccagtttctcgatctgggtggtgtcagctgatccacctggtgccagggtccgcaaaaatatctcaagtactggtcttaggttttacaatagtgatgttatccccaggagcaatttagggagggtcagactcttgtagcctccagttacaggactcctaaaccataatttcaaacctttgggctaatttgttattcctacaaaggcagtctagtctccaggcaagaagggggtttgttttgggaaagggttcttgtgttttaaactataaactaagaggctaggcgtggtggctcatgcctgtaatcctaggattttgggaggcccaggcaggtggatcacttgaagtcaggagttcaagaccagcctcgccaacatggtgaaaccccatctctactaaaaatacaaaaattagccaggcgtagtggcaggcgcctgtaatcccagctactcaggaggctgaggcaggagaactgcttgaacgcaggaggcggagattgcagtgcgccgagattgtgccactgcactccagcctgggtaacagagtgagactctgtgtccaaaacataaaaaataaactataaactaagttcctgccaagttaattcggcttacacccacaaatggttcagtggagcttggaggttagaagcaaggtggagtccgttaggtcagatcttgttcagtgtctcagttataattttgcagtggcagtttcattctcaggtgtttgttatgtattagagtccctaaatctggcaaattaatggaatccggatgccaaggaaagacctcagggaaagagaaatgaaaaagtgctcttgccaagagatggggaaaaaaaaatcctaaaatcactctatttactctgccttgcacatgcaaagcagcatgtaatgctattttcatgttaagggaccagctcgtggtcacaccactgcacttcagcccgggcgacaggaagactgcatctcaaaataaaagaagagcatttaggttgactctagcattttgctattgcaaacaatgctgcaacacatatcctagaagggtgaaagaaatatttattgaacagtaactgttcaataaatgttactattaataactatttaatacttactaagtaactgttaaataaatctcaagggccagtggctcacgcctgtaatcccagcacttagggaggccgaggtgggcggattgcctgagttcaggacttcgagaccagcctgggcaacacggtgtaactccatctcaactaaaatacaaaagaaattagctgggtgtggtggcaggcacctataatgccagctactcgggaggctgaggcaggagaattgcttgaacccggaaggcggaggttgcagtgagctgagatcgcgccactgcactccagcctgggcgacagagcgagactctgtctccaaaaataaataaataaataaacaaataaataaataaataaatctatctatctcagggactttacatactttaccttatttagtcctgggtaccaacaaggtaccgaagagctgaccctttttaaagctgagaaaagcaagatgctgggagggtaaagagcttttccaaagtcacatgacttggaagtgtgaagggacagggacttgaaactagaactacctgaccctaaacccccaactggggcctgcttcagcccaccccaatcattgcctctcagcaaaatactggggagtgtgaccactaatgacagcagcctttaggacacttcaagctatattcatggtcagcgggtcccatttccccaagagaacccgctgtattcacagatcacaaatatcccatgcgatgtgtcttcttgccaagctatttcttttgtgatgcactcacgatgtttcttttctccatccagctgctcagaaagtttgccacctcatgggaattaatgtgacagatttcaccagatccatcctcactcctcgtatcaaggttgggcgagatgtggtacagaaagctcagacaaaagaacaggtaatgatgtacttatcacttatccatccatgcacccacccatccatccattcatccatctatccacctgttcactcattcatgtattcattaatccattcacccatggtctgcctctgcatctgtccatccatccatctttctacccactcattcatctgtctgttcatccatccatccatccatccattcatctgcccatctatctgctcacccatcatctctccatccctcactcatccatctgtccatccatccatgacccagccatctgtccatctgtccgtccatccatcacccatccagctgtcattccattcattcattcattcattcatctgtccatgcatccacccatccatctctttatccctcatttattcaatactagaatattcacagtcccatgtcaggttttgtttgtttgtttgttttttgtttttgagccagagccttgctctgttgcccaggggggggtgcagtggtgccatcgcagctcactgtagcctctgcctcccagattcaaacgattctcctgcctcagtcccccaagcagctgggactacaggcatgcaccacaacgcctggctaatttttgtatttttagtagagaagggtttttgccttgttggtcaggctggtcttgaactcccgacctcaagtgacccacctgcctcggcctcccaaagtgctgggattacagtgtgagtcactgcacccggccaagaataaaaatcttcaccaccagcctggcttatgtgaaaatggagcccattgagaataaccgggttcccctggttgccctctgcaggctgactttgctgtagaggctttggccaaggcaacatatgagcgccttttccgctggatactcacccgcgtgaacaaagccctggacaagacccatcggcaaggggcttccttcctggggatcctggatatagctggatttgagatctttgaggtacagctcggtgggatcctaagagccatggtcttggttgtctgagatgggctttttcttggaggagtcatgattttggagaaaggcatgtagatggctactgtagggtaggaggctgtctagttaagggtggatcattgagggtataagagacagaaatccaacaggaaatgcattggtttctggaactgagaaggccagacatgtagctggatcccgtaggcagggtctgatctcccgccatcgttctctctctctctctgccttcctccatattggctccattctcaagcaggctctcccctcacgggggcaagatggctgccacagctccagactgcctctcagtaatcctggtaaaaaaaaaaaaaaaaaaaaagcacatatctcttttctaacagttccaaccaaaatcttggaattaagtctcactgactcttactcacctgaattgggctacatggtcacctccaagccaagaactgtttgcaggagcttgcaatacctcatgtagtagaaacatggatattggatcctttacccatgggtttgaagaaagttctcagagaaagggaaggttttttttttgtcttgtcttgtttttttttttttgagacagagtcttgctctgtcgcccagactggaatgcagtgtcacaattttgtctcactgctgcctccgcctcctgggttcaagcaattctcttgtctcagcctcctgagtagctgggactacaggagtgtaccactgtgcccagctaattttttttttttttttagacagagtctcgctctgttgcccaggccggagtgcagtagtgcaatcttggctcaccgcaacctccgcctcccaggttcaagtgattctcctgcctcagcctctcgagtagctgggattagtgccaccatgcctggctacttttttttttttttttggtagagacagagtttcaccctgttggccaggctagtctcaaactcctgatctcaaatgatccaccagcctcggcctcccaaagtgctgggattacaggtatgagccactgtgcttggccaatttttgtatttttagtggagagaggtttcgctatgcttgccaggctggtcgcaaactcctgacctcaagtgatcctcccgccttggcctccctaagtgctgggattacaatcatgagcactacacccagccaggaggttttaagattgatagatgtcccgaaagaagtgtactaccgagtcactttctctctgcgcctctgttttcacatctgtaaaatgtttccacatctgtacatgcagtagcgtgccttacgaggtttgtccatccatagatggttgtgcagatggaggagataagcatctttaaggtgtgtgagggccatgtgatatcaacttcaccagccctggtggactctaggcagcatgttttggggcctcagccctgtctgggtgctgggatggcagaacaggatgtgggcgggccatgggggcgctgtcgggtggagcttctgtggggctccttgtcttctgacttcataccaagatgctcacgccccgcccccacgccatgtgctcaggtgaactccttcgagcagctgtgcatcaactacaccaacgagaagctgcagcagctcttcaaccacaccatgttcatcctggagcaggaggagtaccagcgcgagggcatcgagtggaacttcatcgactttgggctggacctacagccctgcatcgagctcatcgagcgaccggtgaggggcacgtgggcgtgcggggctccgtcacaccttgtacacgtgtgtggcctctgtggagccgacgtggaccccacactctccccatgcacatagcattcccccacccaatccatcacccagtcctgaaaggctgtaagctgaatccttgtgaactcttacaatttccattaacccacattttcatatcaaaggtattttctttaatttctgccttccttccatcctcttttttcttcctttttttcttccctaccctctttcccttccctttccttctctgccattgctttttttttttttttttttttttttatgacatggtctgactctgttgcccaggctggagtgcagtggcacaatcttgcctcactgcaacctccacctccctgcctcaagtgatcctcccgcctcagcctcccaagtggctgagactacaggcgtgcaccaccacgcccacctaacttttgtattttcagtagagacagggtttctactaattagccgggcctggtggtgcacgcctgtggtcccagctatttgggaggctgaggtgggaggattgcttgagccctggaggcagaggttgctgtaagccgagattgcgccactgcattccagcctggataacagagtgagaccctgtctccaaaaaaaacttttctaacaggaaccctaggtgaattcaagtcaagcaacaaattcatttgcaagaattatgaactcggccgggcgcggtggctcatgcctgtaatcccagcactttgggaggccgaggcgggcggatcacgaggtcaggagatggagaccatcctggctaacacggtgaaaccccgcctctactaaaaatagaaaaaatcagccgggcgccgtggcaggcgcctgtagtcccagctactcgggaggctgaggcaggagaatggcgtgaacccaggaagcggagcttgcagtgagtcgagatcgcgccactgcaccgtctgcctgggcgacaaggcaaaactctgtctcaaaaaaaaaaaaaaaaaaaaaagagttatgaactcttcatgatgttgcctgcgtgttgcccactagggggcggcagcaaacattatgttctgccttccatccctgttactggtccattgggcacagggtaatttgaaggtagatttggaagcatgggggtcataaactcatctttatatgtgggcaaatacagtatcagatctcggcggatgcccatgcgttgtgtatagttggccagctcttcatggaatgcctgaggttgggtgttctctctgattcaagccctacttgtctcccacagaacaaccctccaggtgtgctggccctgctggacgaggaatgctggttccccaaagccacggacaagtctttcgtggagaagctgtgcacggagcagggcagccaccccaagttccagaagcccaagcagctcaaggacaagactgagttctccatcatccattatgctgggaaggtaccagccacagggcccaggggactctgtctcaggggacccccagtggctgctcagcgcagagacagtctgagagtggcagaaccttgggctgcctggaaactgcaaagccatctgctgctaagcgaatcccaaccaagtcctattcgtaatttgtctacgcatctgtaaggcatcagctgtagccactctcatgttttccaaccgtgacgtccagacagttatttctttctgtttttgttggagacagggtctcgctttgtcgcccaggctggagtgcagtggtgcgatcatagctcactacagcctcaacctcctgggctcacacgatcctcctgcctcagcttcccaagtagctgggactacaggtgtacaccaccatgcccagctaaaatcttttttcctttttgagatggaattttgctcttgtcatccaggctggagtgcaatggcgtgatctctgctaactgcaacctctccctccgggttcaagagattctcctgcctcagcctcccaaatagctgggattacaggcacctgccaccacacccagctaatttttgtatttttagtagagaagggtttcgccatgttggccaggctggtctcaaactcctgacctcaggtgatccacccgcctcggcctcccaaggtgctaggattacaggcatgagccaccgtgcctggccgcccagctaaatttttaaattatgtatagatatggggtcttgctgtgttgcccaggctggtcttgaattcctgggctcaagagatctccctgcctcggcttcctgaagtgctgggattatgagcacgagccactgtacctggcctcagcctgcttttcttgtatagactctaaatccttcctgctacaagttatacccaacaggcggggccaactggaatggggtgactaatacatccacacctggcttcaacaaaaatctcccatgtcacggtcttgagtttgctattgccagcctgctctggccagggaaatctatgatagttgtattcatcatcatcatcatcatcatcaacatgccttggctgttattgtataggcccttgccctgtggctctcaagagtcctggataatgtacaaaggacatagcttagtctggcttgcagaattgtagtattctattgactcctcagtacctccactgcatcatgggcacaaacaatgctctctaccagggcctggcaacagagtccgatctggcccacagcttgttattgtaaataaagttttattggaacacagccatgcccatttgtatgcataatgtctatggctggctgcttttgtatactacagtgctagagttgagtagctgcgacaaagactgtatgacttggctgggtgtggtggctcacgcctgtaaccccagcaccaaggcaggtggattacttgaggtcagcagtttgagaccagcctggccaacatggcgaaagcccgtctctgctaaaaataaaaaataaaaaaaatttaaaaattagccagctgtgagattacaggcacacaactgtaacctcagctactcaggaggctgaggcaagagaactgcttgacccaggaagttggaggttgcagtgagctgagactgcaccactgcactccagactgggcaacagagaaccactctgtctcaaaaaccaaaacaaacaaacaaacaaaacattgtatgacttgccaagccaaaaatatctactatctgggccttcaccaaaagtttcccaactcctagcctatattcaagggggtatatgttcctttaagcatatagagacaacacttttcttttccctacttcatcagtggattttttttattattattttcagtcttctctcagatcaagcctacctattatcctgataacccacatcccatgataacccagcaaagctgtattatcagttcctttcatttaatattcaccatagtaaaaattacggctttgggcattgtcattgtttgagtcaggaatgtaaaaagcctatatgtcctttttctgtatatccatatatcaggatctctgagttacaaattatgctcattagagagtggaaaataggatgccatgcttaattaatttatttatttaattattttgagacagagtctcactctgtcacccaggctggagttcagtggcgcaatctcagctcactgcaatctccgcctcccaggctgaagcgattctcctgcctcagcctcccgagtagctggcattacaggtgtgcaccaccatgcctggctaattttttttttttttttgtatttttagtagacatggggtttcaccatgttggtcaggttggtcttgaacgcctgacctcaaatgatccacccaccttggccttccacagtgctgggattaccagtgtgaaccaccacgcttggctgccatgcttaatttctaaaccaggatgattgggaagatgatgaggggggagttttgcatgtcggcaggagggcatctgccgtcatgaaatctcttaatagtgtataactcacaggtactgtgctggcttaggaggagggaggctaccacagcagcgttagtaggagaatatggaatggaaactaggctttcccagcaatggctatcactggctgatgtcctactacgtgggcacaggtccctgggctgttggtctcttcactggtgtttgtggagtcccatcatggtggtcataaacgtcatttcctctctgacctcagaagatctggaaggacaatgggagggctggggtcctggccttggtttctaagtttctagtttcccaggggttctgaccagcagggtgtccttggcaggtggactataatgcgagtgcctggctgaccaagaatatggacccgctgaatgacaacgtgacttccctgctcaatgcctcctccgacaagtttgtggccgacctgtggaaggacggtaaggccttctctgctcgggtccatgttctgctttgagctggagaattgaacacccaagtcccccgactctcacacctgccccaggaggggaggcctttacatgggggcaggggaaggaagagcattggcatgggctggtgatgtctcgttgaaacaatttcttcctgagtgggggtccctgagcccctcaatcctacatgtcccgaggggattgaggtcctgaggtcagggctcaggcaatagaggagaaacagcatgccaggcacggggagttagactgccctgtccagagtcagaaggacttcactgtatcttgtctctgccacctcctagctctgtggtcttggatgagtcacttgatgtcattaagcttcattgtcctcattagtaaaacaggagatgcaataatagttgccgtctctactagaggtattatgagggttaaattagaccagtgatgctcaaactcaagcaggcatcatgaccccctggaaggctttgtttatttatttagggacagagtcttgctttgtcacccaggctggagggcggtggtgcaatcttggctcactgcagcctccaccttctgggttccagtgattttcctgcctcagcctcccaagtagctagcattacaggcacacaccaccatacctggctaatttttgtatttttagtagagacggggttcccccatgttggccaggctggtctcaaactcctgacctcaggtgatccgcccacctcagcctcaaaaagtgctgggattacaggtgtgagccactgcacctggccctctttggagggctttttaaaacccagatggctgggcctaccctaagatctaattctgcaggtctggggccagggatggggcgggcctgaaaacattcatcccaggtgatgctgctggtctagggaccacactccggctccctttgagaaccagtgaatagatgatccctgtgaagagctgctggagtgatgatgaggggagggggtttgctgtttgtccctggccatcagtgtccacagcaggttttattcttggcacagggcccatgggcctggggcttacaggactggtctccccttgttttaagcatgctaaaaaaagggctccaggaggggccagctgtgccctaaccatatgccaggctctgggcctagggaacaacatcgcaccctgggtctgtgtcatcccaggacacatgatgaagcctgtagtccctcctctgcgggacccacagtcttgtgggagagatgagactctcaaagacaagcagagagacaagcatgaggctgcgcatggtggctcacacctgtaatctcagcactttgggaggctgaggcaggaggatcagttgaggtcaagagttcgagaccagtctggccaacgtggcgaaaccccatctctactaaaaatacaaaaactaactgggcgtggtggtggtaatcccagctactcgggaggctgaggcaggagaactgcttgaacctgggaggcgcaggttgcagtgagctgagattgtgccattggactccagcctgggcaaaagagcaagactctgtcttgaaaaaataaaactaaaaataaaaaataaaaacaaaattagccgggtgtgctggtgggtgcctgtaatcccagctactcaggaggctaaggcaggagaatcacctgaacctgggtggtgaaggttgcagtgagccaagatcgtgccactgctctccagctgggcgacagagtgagagcttgtctcaaaaaaaaaaaaaaaaaaaaaagattgttacacagaatctgagtagaaggtgaagaaatggtgccatccatggcctgtgggttgggcttggcatgtgcaggacctgctgggctggtagaaaaagaaccttggaggtgatgatgatgatgatgatgatgatgatgatgatggccgggcgcggtagctcacgcctgtaatcccagcacattgggaggccaaggcaggggaatcacctgaggtcaggagttcgagaccagcctgaccaacatggagaaactctgtctctactaaaaatataaaaaaaatgagccgggcgtggtggcgcatgcctgtaatcccagctactgggaggctgaggcgggagaattgctggaacccgggaggcggacgttgtggtgagccgagatcacgccattgcactccagcctggccaacaagagtgaaactccgtctcaataaaataaaataatgataataataataataataataataataataataataataatacctactttttgttgagcacttactgatgtgccaggctatctcggagtgtgtgctgtatcttctgcctcagaatatttcttccgtggatacctacatggttacccactcatttcttgctggtttctgctcaaatatcaacttagcagagcccaccacctccttgtctaagagagcaccctcttcactctctctccgctttaccctatttttatttttctacgcacacctcactactcaagatattccatacttaacatctgtgatctctgtctgtctccttccctgtgatataagcggggtgagggggccgggtctttttttgttcacagcagtgtccccagggcctggagcacagaaggtcctcaataactatttgttggtggatgaaagattggaggctggcagggaataagtgccttctgtgccttatttttttttacccctgccctagaaggtagacggtattattacctcccttttgtagaaagggagactgaggcacaggatagtgccaagccaaggctagtcagtgagtggacagcgagagcaggcttgactcctaggtcagcgtgactccatcacagggaatttgttctttctgccactcaggtgctctcaggatttccccaatagacaatacttggaaaccctgactgccgaaggaggcgttggtgatggaaggaaagattggagtgggcaggttggtgggtggggctggggctgagcctctggcctatttaggggtgggtgggccagaggctgatgccaccctggctgtgccccatagtggaccgcatcgtgggcctggaccagatggccaagatgacggagagctcgctgcccagcgcctccaagaccaagaagggcatgttccgcacagtggggcagctgtacaaggagcagctgggcaagctgatgaccacgctacgcaacaccacgcccaacttcgtgcgctgcatcatccccaaccacgagaagagggtgaggcccgccgcccagaccctggggctcccagaagccagggctgtcccaagcggtcacagcgtccccagggcgccctctgcccccacctaccccgaggaccccattttccatgtggggaaggctatctgaatctcagacccattccccatccctggaggaaaaggaggaagggaggatgcatccagagacttttcagttgtggagttgctgtgcaggtcatccagccactcattcattcattatcccaggaagtattcactgggctctgccctgtcctgggtgctggggagcagtgttagaaaaattgtagcccttccctgtgggtttctcataatctggtgcaggcatcttcagcttggggcgattgtgtcctctatatggacatgctacagacatttttggttgtcacaaccaggagggggctgttagtcagcatctagtgggtaggggccagggatgccctaagcattgtacaatgcacaggatggtccctcaacccccagcacagaatccctacaagatgccagtagtgctgaggttatgggagacacggggagaggtaaacatacagctgatgatggtgatggaatgtggtcagttaggagaacaccaaagagccagggctcctcccacagcctcaggactcagagaaagcttctggtgaacttgaacgttaagaatgtgtggccatcaacttggtgacatggaaggcagggtggggcctaggataagcagggggcctaggataagcagagggcccaggctaagcaagagtgtggaggtgagaagtgaaggaactaggtaagaaaatgctagatagtgtccaggcgtgttgctcacgcctgtaatcccagctactcaggaggctgagaaacaaaaatctgttgaacccaggaggcggaggttgcagtgagctgagattgcaccacagcattccagcctgggcagcagagcgagactccatcttaaaaaaaaaaaaaaaaaaggaaagaaaatgctaaataggtcatttcatgttgcaaatgtgtgatggcatgaggtaggaatcagatggtgtgaggtaggattgaggctgaatgggtaggcaggggctagatcgtggtgctccttgtgttctttctggagcttggccttctctctctaggcatgccattgggggtgttaaagcagggctatatcatggtcagatttacattttaggaagtgaatgagggggctgggcatatgctagctcatgcctataatcccaacactttgggaggttgaggtgggaggatcacttgagaccaggtgttcaaggctagcctgggcaacatagcaagaccctatatctacaaaaacatttttaaaaattttccaggcatggtagcacatacctgtggtcccaaatacttgggaggctgatttgggaggatcacttgagcccaggagtttgaggctgcagtgagccatgatcgcaccactggactccagcctggctgacagaatgggaccctatctcaaaaaataaaaaggacaaagggattgaggggagaggcaagaccagagagagagaccaggtgggtggtttctgtggttgtccaggcaggagaagatagtggagacaatggtggtgaagagaagtgggggggttgggagatatttgggagctagaagcaatcaaactgctgatggacaggaagtgagggagacgaggtgatgaggaggaagccccaggttccagccaggcgatgctagtgtcaccaagaaccagagagatcatgaggcagccattgccgaagcaaagagatgaaaacccagaggggggcactgctttgcccctcggccctcagctaagccctccttgggtgcttctgttggtaccctcatggcctggccaggtgggtcatccaggtaggaggtttggggctttgctgcgccatggtttctggccccagggatccactgccctctttgacctttgcagtccggcaagctggatgcgttcctggtgctggagcagctgcggtgcaatggggtgctggaaggcattcgcatctgccggcagggcttccccaaccggatcgtcttccaggagttccgccaacggtaagtcccaaggtctggcccaggtagggcagggggtgagcgggactgggtggaggaatggatgctggaggtacccggggtgacttctgctctgtgtttcaagctacgagatcctggcggcgaatgccatccccaaaggcttcatggacgggaagcaggcctgcattctcatggtgagcccagaagtccaccagagacctcccaacctctggccgcaagccacctgctgctcttggtgggaccgttcttacccatgtcatcactggccaaatggcacagtggaaatcaggagctcttcctttccttccttttgcagatcaaagccctggaacttgaccccaacttatacaggatagggcagagcaaaatcttcttccgaactggcgtcctggcccacctagaggaggagcgagatttgaagatcaccgatgtcatcatggccttccaggcgatgtgtcgtggctacttggccagaaagtaaagatgctttcctgcatcctaatacctcaaacgcgaatcacaaacaggggcctttctgttctgattccctgattctaagaggccacctgtttaagatgcatcattgactgaatgacagccttttcttgaaggggaagaaatgcttctactttaaataaatgtaccaagttacgagtgcaggaagggaacgagttttagacctgggttctcatcgtggatgccccagtttttgctgatgaaccttgggcaagttactctacctctctgagcttccagttttttagctggaaactgagcataatcattttgacctcagagagctgttcatgaggtgtcactaagataacgcatgacgagagcttagaacagtgcgtggttctcaggtcagaaatgattgttgttgtttttacctccctccctcactccttccttccctccctcccttccttccttcctttcttcttcctttttgagacagagtctctctctctctctctgtcgcccaggctggagtgcagtggcgcagtctcaactcactgcaacctctgcctcttggactcaagcaattctcgtgtctgagcctcccgagtggctggaattagaggcgcccaccaccacactggcctaatttttgtatttttagtagagacaaagtttcaccatgttggccaggctggtctcaaattcctggtctcaagtgatccacctgccttggcctcccaaagtgctgggattataggcatgacccactgcgcccagcctagacatgttagaattggataaaccattgaggaaagaggacttgacggtgtctagatccccgtgtcccagtgggatttataaggcagggttttggagggtgtgatgtcccagctgttctgtgaagactgggagccggggaagggttcgggttccttaatgaaagtcataccccagggactgcagggacaggtggggtcgctctctgtctggggtgtgtgttgtcattgggcagagaccacaccctcaccagtaggaccctgatgtgtcaggttcattcattgacacatggacccaagatggtcaaggccagctttgggagctcttggccctcccgcaacagacctaacttgtcaagtttcgttactaagttccctgttgctgtccttcctggataactggggcaattttattcttaaagttttcctgtgtccaagatggcagccaagcagggaagacagaattacgttcactgttctatcgtttctcaatctatcgatagcccttaaacgggaagagtgctggttcagggtcacagtgtgaaattcctaaaacaacccaggagagaataggtttgacagggctgggtgtggtagctgacacctgtaatcccaggcactttgggaggccgaggcaggaggattgcttgagcccaggagtttgagaccagcctgggcaacatggcgagacccctatctctaccaaaaaaaaaaaactttaaaaattagctgggcatggtagcatgtgcccgtagtcccaactacttgggaggctgaggcaggaggatcatttaagcccaggaatttgaggctgcagtgagccatcatcacaccactgcactccagcctgggccgcagagccagaccctgtctctgaaaataaacaaataaataaataagttagtcagaaacagctggtgtaggctgggcatggtggctcctacctgtaatcccagcactttgggaggccaaggtgggtggatcacctgaggtcaggagtttgagacccacctggccaacatgggaaaccccatctctactaaaaatacaaaaattagccaggcatggttgtgggcacctgtaatccaagctactcaggaggctgaagcaggagaatcacttgaaccccggaggtggagtttgcagtgagctgagatcgtgccaccgcactccagcctgggcaacaagagcgaaactctatctcaaaaaaaaaaaaaaaaaaaaaagaaagaaagaaaaaagaaacagctagtgcagctggggagtacgggagcccccttaggaatgatgcacatagttgtgttttctgagtggtgtttggatctcagctaagtccagggcatgttgtgagccctgggtcttccttgtccactgaaaaaggctctgtcctgtagatgatttaagttgtttgcagccagacaacacatgtgtcacacagggtttctggaagaacctgagttggggagattggggcatgtccctgtgcaggttcaggatgctgcagggcagggctctgttgacagcagggtgtggcttcatgacccccgcaccttctcttcccccctccctagggcttttgccaagaggcagcagcagctgaccgccatgaaggtgattcagaggaactgcgccgcctacctcaagctgcggaactggcagtggtggaggcttttcaccaaagtgagtgctctgccccagcccccttcccaggggcccccagccctgcttcttcactctggagccttcacatttgggacaggaggtggtcgcaagtgggtgtggaatggagggctcgaactcagaccttgagcattggcggttctctggcccgaggaggccctgtcctttggcacataggctatagccaggaccttaacacaaagtattaatatttccatccgcactggaatccctcgtgtggcccatttatagccacacccacttcctccgtagccatggaaaccactctgttctccagttctgtaattttgatggttcaagaatgctgccgggggcggcggctcacgcctgtaatcccagcactttgggaggccgaggcaggcggatcacttgcggtcaggagttcaaaaccagcctggccaacatggcaaaaccctgtctctacttaaaatacaaaaattagctgggtatggtggcaggcacctgtaatcccagatactcaggaggctaaggcaggagaatctcttgaactcaggagacagaggttgcagtgagccaagatcatgcctgcactccagcctgggtgaaagattgagactctgtctcttctttctttttttttttatttaaaaaaaaggccaggcacggtggctcacggctgtaatcccagcactttgggaggccgaggcgggtggatcacaaagtcaagaaatcaagaccatcctggccaagatggtgaaaccctgtctctactaaatgtacaaaaattagctgggcgtggtggcaaacgcctgtagtcacagctactcaggaggctgaggcaagagaatcacttgaacctgggaggcagaggttgcagagagctgagatcgcgccactgtactgcactccagcctggtgacagagcgagactccgtctcaaaaaaaaataaaacaaatattctatacatggaattagagagcatccagactgttgcatgtatcaatactgcaggtttttttttttttactttttgcattttttgaaatggagtctcactctgttacccaggctggtcttgaactcctgacctcaagcaaccctcctgcttcaggctcccaaagtgctgggattacaggcatgagccacctcatctggccatagcatattattttttatttctggcagagtcagggcctccagaggactcaactggttcctgtagtggcactggttgcattgtccccatggcacaaagacatgctctgttgcaatagactaggcttctccttatatgcccttgagtgtatccactggtgcaaggctttttcaccaagcaaacagacattgagtgcctgctgtatcccaggcacatgctaggtgctgggggtgcagctgtgaacacacaccatggtccctgacctccatgaatattctagccgaattggtggggagtaaacaataaacagataatcacagagacagatacataatggcaaactgtgataagtgcatgaagcaagctgctggagtacatagcaggggcttccttgtgccaggcaggggcttgaaaacaaagagttaggaggcagcccagggaaggacagcagatgctgctttttggaaatgttcgtccccactgaaccaacttctgaaaaactatcctaagaaaatcgtcttagccaggtgtggtggctcatgcctgtaatcccagcactttgggtggccaaggcaggaggatcacctgggttcacgagttcgaaaccagcctggccaacatggcgaaaccctatctctactgaaaatacaaaaattagccaggtgtggtggtgggcacctgtaatcccagctactcaggagattgaggcaggagaatcacttgaaccgaggaggcagaggtttcagtgagctgagatcgtgccactgcactccagcctgggtgacagggcgagactccacctgaaaaagagaaaagaaaatcaagagttaagggcattcattatggccttatttacaatagcagaatttcagtgtccagtcctagctgaatgatgagttcaataatggttcatctatcaatggaatgttttcagctattaaaatgatggctttggctactgaataggtctgctaaaaaaaaaaaaaaaaaagacttctacctagctgtctagttggacactgtggcatgtgcctgtagtcccagctactctggagctggggtgggaggatcgcttgaggccaggagttcaaggctgcagtgagctatgattgtgtcactgcactccagcctgggtgacaaaacaagaccatcgctaaataaataaattaacttaaaagatggctatgtaaagttgtaagaatgatgtaacagcatggggtaatacatatcttataatttttaaaaaaattttatttgtggagacagggtctcactgtgtcacccaggctggagtgcagtggcacaatcgtggctcactgcagcctcagcctgcagggttcaagcgatcttcctgcctcagacccctcactagctgggactacaggcacacaccaccatgcctggttacttgtttttgtagagatggggtctcatgatgttgcccaggctggtcccaaactcctgggctcaagcgcttgcctcggcctcccaaaatgctgggattacaggcatgcatcactgttcctgtctgtatcatataattttaaataataaaagcagcctctacaactaggcagcatggtcttaagtctattttttaaacatagaaaaagagccaggaaggaaatgtaaacaatgttaataatgactttgatagggaggtgggtgggatatgaaagattttttttctcccttttgtccttggaaggaaatatcacttttcagcagtagttctctgttgggatggttctaaagtggggaagatgagactttttcctttcactttgtaccttttctggtgctctgatttagagctcctcagtcttgccactgttgatattttggggtgactaattctgttgtgggggctgtcctgtgcactgtagggtgtttagcagtatccctggcctctacccactggatgccagaggcaccccccaccccagctgtgacaatcagcagtgtctccagacaatatcccctagtggggatcggtgggggcaacattgtccctggctcggaaccactgatcgaatttattatgacaacatatccctttgccacaaaaacaaatgatgggctaaccgtgtgtgtgcaggtgaagccactgctgcaggtgacacggcaggaggaggagatgcaggccaaggaggatgaactgcagaagaccaaggagcggcagcagaaggcagagaatgagcttaaggagctggaacagaagcactcgcaggtacctgtatggatgcatggctggggttgctggggaacaggacttggccccgtggggctcacccgcctcctccccaccacctgcgtgcagctgaccgaggagaagaacctgctacaggaacagctgcaggcagagacagagctgtatgcagaggctgaggagatgcgggtgcggctggcggccaagaagcaggagctggaggagatactgcatgagatggaggcccgcctggaggaggaggaagacaggggccagcagctacaggctgaaaggaagaagatggcccagcagatgctggtaaggtgtcacaggggcagcccgtggtgggtagcaaatcacttgaccctcaccacaggcctgtggaggtgcatccagggatatgtgtccctgctgggacagatgatgagacgggggcttggagagggttggtcatctgatcaaggccacacagctgggattgggactggaacacagtgagcccactctgttctattgccctgccttgcatgtgctaaccccttttctcctaacagcaagcctgaatggaggataattgtatttgttagctattgctacataacaaaacatgccaaactcagcagctaaaaataaaaagtattgcatagtcaggaatttgagagtggcttaggtgagtggttctggctgagggtccggcctgaggttgcagtcaaggtgttggctgaggctgcagtcatctgaaggctcatctggggctggaggacccacttctacttggcttattcacacagctgttggaggaggcctcagttccttatcatgaaggcctctcccctcagggctgcttgagtgtccttccaatatggcagcagagttcccccagaaggagtgatctgagagaggagaaaggaagccgcaatgccttttatagcctaatctctgaagttacattccatcacttcttcctgatttttgttgttgttgttagaagcaaatctaacccccactcaaggggaggagaattaggctccacctttttggagtcgcaaagaacttgtggatagattttaaaaccaccatggtacctactgtgctcattttatagatgaggaggttgaggttccatgaagcagagcagcttacccaggtctttattttttttttttttttgagacagagtctcactctcttgcctaggctggggtgcgatggtgcgatctcagctcactgcaacctctgcctctcgggttcaagcgattctcctgcctcagcctcccgagtagctgggattacaggagcccaccaccatgcctggctaattttttttgtatttttagtagagacggggtttcaccatgttggccaggctggtcttgaattcctgacctcaagtgatccacccacctcggcctccaaaagtgctgggattacaggtgtgagccaccacgctcaggcctttatttcttccttttaggaggctacagagttctgggcatcttcaggcctagcccctgtattcattagtccccagatcaccacgagagtaaatctgttataaccaaagctgttactcttttccctccacaacaaaggaccttgaagaacagctggaggaggaggaagctgccaggcagaagctgcaacttgagaaggtcacggctgaggccaagatcaagaaactggaggatgagatcctggtcatggatgatcagaacaataaactatcaaaagtgagtaggggccgggtgcagtggctcacgcctataatccgagcactttgggaggccaaggtatgtggatcacttgaggccaggagtttgagactagcctggccaacagggtaaaactccatctctactaaaaatacaaagattagccaggtgtggtggccagtgtctgtaatcccagccacttgggaggctgaggcaggagaatcacttgaacctgggaggtagaggttgcagtgagctgagatcgtgccactgcactgcagcctgggtgacagagtgactctgtttcaaaaaaaaaaaaaagtggaatcaagtttctgcattaaaaacaacaggcttaccaggatcagggagattttggggatttgggactttcagttctcaaagcagaaaagcccttagaaaaccaggacaagctggtcaccgtagtcagtagtcactaaccagccccacctgcttttagttctttgagctggatgtcagcttggcccctactgtgagccaggctctgtgttagatgcaggtatgcatggtgaaggaggacccttcccttgtggggtttatactgtagtgagatggcaaataatcgtcatttaccatggtgatcagggctctgaaggaaacgttcaccatattttaagagtgcggcaggccgggtgcggtggctcatgcctgcaatcccagcactttgggaggctgaggcaagtggattacctgaggtcaggagttggagaccagcctggccaacacggtaaaaccccatctctactaaaaatacaaaaaattagttgggtgtgttggcgggcgcctgtagtcccagctactcgggaggctgaggcaggagaatcacttgaacgtgggaggcagaggttgcagtgagctgagatagcaacactgcactccaccctgggcgacagagtgagactctgtctcaaaaaaaaaaaaagaatacagcagtgggggatagaggaagggtattcatagaagacttcctggaggaggtgacatttaagcagaaacttaaagatgaaggagcagttagaggggagtagaagagcatctcagctggttggcccactgtgcaaaggccctggggcagggaagagctggccagtggcaggaatggaaggagggtacctttagctgaccatacaatatgagggacaaactggcacgagatgagaaatggccagtttttggaaattgttatgggacttctctttaccatttaaaactctagttgtattttgttataatgtgggtttttctttcaactgtttacatggaaatcactaaaagtgaaacatagattctagagaaaagaaaaatcctaaagctatctctttctctttccccaaaaaggaacgaaaactccttgaggagaggattagtgacttaacgacaaatcttgcagaagaggaagaaaaggccaagaatcttaccaagctgaaaaacaagcatgaatctatgatttcagaactggaaggtaaaccagctaccaagagatttatttttattttattttattattttttttagagatgaggtcttgctctgttgcccaggctgcagtgcagtggtgcgatcatggctcactgcagcccgaaactcctaagctccagtgatcctcctgcctcagcctcctgagcagctgagactacaggcgtgcatcaccacacccagctaatttttttttattttttattttgtagagatggggtttcactatgatgctcagtctagtctcaaactcctgggcccaagcagtcctcccaccttggcctcccaaagtgctgggattataggcatgagccactattcctgggcttgaatgggtatttttaaaagcaggaaaatcagaaaggaaatttgaggatggcagatcatcccatgagtgacaactaactctatgccacctctcgaaatcacccttagtcatcacatgcactaataatatgataaaagggctgggtgcggtggctctcgcctgtaatcccagcactttgggaggccgaggtgggcggatcacgaggtcaagagttggagaccagcctggccaacatggtgaaaccctgtctcaaaatacaaaaattagccaggcgtggtggcgggcgcctgtaatcccagctactcgggaggctgaggcaggagaattgcttgaacccgggaggcggaggttgcagtgagctgagattgcgccactgcactccagcctgggcaacaagagcaaaactccatctcaactaataataatattatgacaatataaggtgctgttcatcgggagataatggtccagaccgtgactatgatggttactgattgggggatgtgttcatctcctccgggtaaaatgcctgggcaggaaggctcatttccgggcatctctctggggcctccccttcctgaagagcaccttggtttttgcagtgcggctaaagaaggaagagaagagccgacaggagctggagaagctgaaacggaagctggagggtgatgccagcgacttccacgagcagatcgctgacctccaggcgcagatcgcagagctcaagatgcagctggccaagaaggaggaggagctgcaggcggccctggccaggtagcggggctggcaaggggcatttgctgtgtgtccatgtatcccctgggcccctgctcattcgctcattcgcagtggctgtcttggtcaaggcggccccaggcccttggcatgaacttcgtttcccaggccaggcctcccacaagccttctcgaccctgttcactcccccagatcctcaccttcgactttcttctcttccctgcaaacacatcatgtctttgcagttgatctcacctactcccatggtgttgctgctgcctcttcgacatccaggcttttctcatctagacccccttctgaatttccgattgcccaatgagtcaatttccaccgtcatctcaaacacccctgtctaaggcgggaatgaccttcctttccccagcccctccctctaagggccctcttttttgtgaacaccaatctcctcctttgtttctgccgacccacagcaagcagcaaccttcagattctgccagtccttctaaatgtcccccacccatttcctctggtttttccctcttcctggctcttagctggatttacactaatgctaatactgcagcagccactatgaatgattatttacctgctcactcggtgctaagttcttttcaagcaatacctttgcagacacctggccaggtgtactgccggtgtctttgaggaggaagctgagcctcctaggggtaacgcaacaggagcaatgtcattgcttctaagaggcagagctgggatttaagcctcaaagctttctgattgatcccctggcctggctcttttgtcggccaatttgtgctatgttgacagtgctacggtgatgaagggaaagcatctctctggggcaggaacctgctcacaaaactttgctggctggatgcagtggctcacgcctgtaatctcagcactttgggaagccgaggtggggggattgcttgaggccagcagtttgagaccaacatgggcaacatagcaagaccctgtccctacaaaaagttaaaaaatgagccaggcatggtggtgtgtgcctgtagtcccagctactcaggaggctgagatgggaggatcacttgagcccaggaggttgaggctaaagtgagctatgatcatgccactgcactccagcctgggcaacagagcaagaccctgtctcaaaacaataataacaacaaaacaaaaacctaacttcactggcttactagggaaaatccagtttccttagcctcaccctcagagcccatccaccctctgcagtctcaccccaacccaactatttcactttctctcttgttgctgccctttcacaagtacagtaaaatcaaagtgcttgcctctcctgcagcattctgccatttaacagggcttcttgcagcccaccttgatctctggtcaccacctccaccagatgcagagccccagtctgaatatcccccgcaagcagtggctggccaaatgctgtgcatggggcgggtactcagtcactgagcaaatgcagaaagaacagacagttgccagggaagaagaactgtccaacattcagaaagcatctacacagtccctactgtgaccaggtaccttgccagtctggggtcaatgctttgcattcttgcacacacatgcacacacgtgcatacacacgtacacacacccatgcacatgtacaacctgttttgatgtcagaccttggcactcacatcctatgttaatctcatatagtctggcatgtcaagaagcagacctggggacatggatagaaggtgtttgatgtctctgcaacataactgtctggtcccagaaaagtttttggccacattgtaagagaggaaaccaagggacctgggggttcattctgctgggtctctccctggaaggcttgacgatgaaatcgctcagaagaacaatgccctgaagaagatccgggagctggagggccacatctcagacctccaggaggacctggactcagagcgggccgccaggaacaaggctgaaaagcagaagcgagacctcggcgaggagctggaggccctaaagacagagctggaagacacactggacagcacagccactcagcaggagctcaggtgaggggcccatcaatcccaccatcctgctatcccactgcaccaatgggatgggggcagaagaggggacaaacccaaagcaaatcgtgcatcagcccctgtgcatttaccttcctggccgcggtttgctttaacttatagaagcatggttggctgtttcttttttttctttcttttttttttttttttgaggcagtctggctttgttgcctaggctggagtgcagttgtgccatcttggctcactgcaacctccacctctgagatttaagcgattctcatgcctcagcctcctgagtagctgggattacaggtatgtgccaccacacccggctaattttttgtttttagtagagatggagttttgccatgttgcccaggctggacttgaactcctggcctcaagtgatccacccacttccgcctcccaaactgctggtattacatgtgtgagccactgcacccgaccctcatcatcttatttctcatcagaagagtagtatataccagggatgtacaatcttttggcttcccttggccacattggaagaaaaagatttgtcttgggccacacataagatacactaacactaataatagctgatcaactaaaaaaattttacaaattggaaaaaacatctcatactgttttaagaaagtttatgactctgtgtcaggctgcattcaaaaccatcctcattggtaagcttggatatactcagagaacaatttgaaaactatagaaaagcagacataaaaaaaaatcacctttagggtcgggctcacgcctataatctcagcactttgggaggccaaagacaggtggatcacttgaggtcaggagttcaagaccagcctggccaacatggtgaaaccctgtctctactataaatccaaaaattacctgggcgtggtggcgcatgcctgtaaatcccagctactcaggaggctgaggcagtagagtcacttgaatctgggaggcagaggttgcagtgagctgagatcgcaccatcgcactccagcctgggtgacacagtgagtgagactccatctcaaaaaaaaacaaaaaacaaaaaaatcacccttagtcacaccagttaacattcttgagaaattccttcctgtctgtgtgtgtatcagtcagtccccaagctccaattcccaagtatgtgtgtgtatcacttttgtgttaaattttaaaaataaaattgatcagattggttttcaattgaagattcacttcaaatgaacaaacaataacaaactgcctgccagatcacgaatcctgactctagtgaaactaggtcattgattcattcagtaaacacataaatgtattttgatgcaatctgtggtgttggcatagcatgtatcatagcatatagctatgctagctgtgccaacaccatataccctggggtttacttcccccactttgggttttgtgcagtgtcacatgcacatagagcacagcgttctgctcccttgccgcttggcctttgatacagaagagcccagtgcatgggccaggtatggtggctcatgcctgtaatcccagcactttgggaggctgaagcagacagatcacctgaggtcaggagttcgagaccagcctggccaacatcatgaaaacctgtctctactaaaaagacaaaaattagccgggcgtggtggtgggcgtcggtaatcccagctacttgggagactgaggcaggagaatcccttgaacctgggaggcagaggttgcagtgagctgacatcattccactgtactccagtctggacgacggagcaagactcgataagaaaaacaaacaaacaaaacaaaaaaccaggctgagtgcggtggctcacacctgtaatcccagcactttgggaggctgaggcgggtggatcacctgaggtcaggagttcgaaaccagcctgaccaacatgttgaaaccccatctctactaaaaatataaaattagccgggcgtggtggtgggcacctgtaatcccagctacttaggaggccgaggcaggagaatcgcttgaacccgggaggtggaggttgcagggggccaagattgcgctgtcgcactccagcctgggcaacaggagtgaaactccatctcaaaaacaaacaaacaaaaccatggactcaaggtcaaggtttagcttctaattctggctccatcacacaatggctgtgacaccatgggtaaaactgcttaccctctcttagccttagtttcctcatttgtaaaatggaaataataacacacctgcctctttgggttgctctgaggattagatgatgtatataaaaaacttagctcagggcctggcatatagtaactgctcattaaataagagccaacattaatatttaagcaaaattttgcagttcacagacatcctttcaattctattactttgtgtatttgtttgccagtcattacagatgtcctaggcaggtgatatgctccacattttgcagctgaggaaattttaggtccagagatgttaggtgaatgacccaaggtcacacagctagagaggggtggtgatgaggactgcagctctgggtcctggaagagctctcattcttttgcacggcactgagatgaccctctgtctccacccaactgccattcactgtgttcctcccaccaagggccaagagggagcaggaggtgacggtgctgaagaaggccctggatgaagagacgcggtcccatgaggctcaggtccaggagatgaggcagaaacacgcacaggcggtggaggagctcacagagcagcttgagcagttcaagagggtaatgctttttggtgatgctttttggtgatgacacataagagtgacatcagcagcctcaaattactacaggtcagggtctgcataaagacaaaaaacaagttacataagattctaatgatgatgatagcagcttatatttatttacaaaatgcttcccatacaggctgggtgaggtggctcacgcctgtaatcccagtacttggggaggctgaggcgggaggatcgcttgagctcaggagttggagaccagcctgggcaacatagtgagaccttgtttctactaaaattttaaaaaagtaggccaggcgtggtggctcaagcctgtaatcccagcactttgggaggccaaactgggtggatcacctgaggtcaggagttcgagaccagcctggccaacatggcgaaaccctatctctactacaaatacaaaaaattagccgggcgcggtggtgcatgcctgtaatcccagctactcgggaggctgaggcaggagaatcacttgaacccaggaggcagaggttgcagtgagcagagatcatgccattgcactccagcctgagcaacagagcaggattccatctcaaaaaaataaaataaaataaaatattggccaggcctggtagtgcattcctgtggtcccagctatttgggaggctgaggtgggaggatcgtttgagcctgggaggttgaggctgcagtgagccctgtcatgccactgcactctagcctggacgacacagtgagaccttaatcaaacaataaaaataggctgggcacggtggctcaccatgtctgtaatcccagcaatttgggaggcaaggcgggcaaatcacttgagctcaggagttcgagaccagcctggccaacatggtgaaaccccatctctaccaaaaatataaagaattagctgggtgtggtggcatgtgcctgtaatcttagctactcgggaggctgaggcaggacaatcacttggacccaggaggaagaggttgcagtgagctcagatcgtgctactgcactccagtctgggcgacagagtgagccgccatctcaaaaaaagaaaaaaaaaaaagaatgaatagaaatgcttctcatacagtatgtcaattaatcttcacaaccaccctgtgagacgtgtactattaaactcattttacaagcaaagaaactgaggtcctaggtgcctagaggtgaagagacttacccaaggtcacactgctggtaagtgacagagccatgatttgcacccaaacagtctggtcctagaccccactttctggcctctacaggactgaaggcctataggatgggtggggcctatcaatatactgcccttcagggataagcaaaggtgtaacaacactttcggggagatttaaatgaaacttaaaactgggatcattctatccactttaatttctctgcagactggaggaaggccaggcatggcggctcatgcctcccgtaatcctaacactttgggaggccaaggagggaggattgcttgagcccaggactttcagatcgcctgggcaacatagcgatttttcttttgtaaaaaaaaaaaagactggaggaaacttgtcattatttgatttcaatggcagaacagctctctccggcataatttgagaatgactaggtcaaatcactctcccgttgttggaactctttgcggtgtatgggagtgggagctggtaaatagcagtaccgaatgctgaatcttgggtgctcttctctcctttggggtagtgcctgtgcttcattccccagggtaagttttttagcttgcgaccttcggccagattgttttcctgaaagcctgagttacattaccctcagcgttgcagctcctccacatccccttcagtggaagcttttggttctgctagattaagtgggtgcagcattgcctaaaaattttggggaatttgcatttggttctatcactagtgtattggtccgttgttgcactgctctacagaaatacccaagattggattatttgtttattttttgagcagtggagtcttactctgtcactcaggctggagttcagtggcgtgatcttggctcactgcaacctccacctcctgggttcaaatgattctcctgcctcagcctcccaagtagctgggactacaggcacacaccaccatgcccggctaatttttttttttttttttttttttagtagagatggggttttgccatgttggccaggctgatctcgaactcctgacctcaggtgatccacctgccttggcctcccaaagtgctgagatgacaggtgtgagccactgcaccaccctgagattgggtaatttctaaagaagagaggtttaattggctcacggttctgcaggctgtacagaaagcatagcagcttctgcttctggggaggcctcaggaaacttaccatcatggtggaaggcaacggggaggcaggcatgttttacatgaccagagcaggcagaagagagagaatggggagctgccagacacttttaaacaaccagatctcatgagggcagcaccaaagggatagtgctaaaccattagaaactgcccccaaaggccgggcgcggtggctcatgcttataatcccagcactttgggaggctgagataggcggatcaccaagtcaggagttcaagactagcctgaccaacatagtgaaaccccatctctactaaaaatacataaaattaggctgggtgcagtggctcacgcctgtaatcccagcactttgggagcccgaggcaggcagatcacctgaggtcaggagtttgagaccagtctggccaacatggcaaaaccccgtctctactaaaaatacaaaaattagctggacgtggtggcggtcgcctgtaatcccagctacttgggaggctgagacatgaaaatcacttgaacccaggaggtaaaggttgcagtgagccaagattgtgccactgcaccccagcctgggcaacagagtgagactcagtttcaaaaaaaaaaaaaaaaaattatggttggaagagtgaggccccagacagaatcactgaccctccccatgcttggggttcattagacgtgaacaggagctagaagccaagcccattcccagccaggcctctttgggaagacgcagttattaagaccaccagcagacggcatgtccattactgacccgcacaaagcaggtagaggtgcaaacctctgcccatctcaggtgcagggaaacagaggcctttgcctctaacaacttgaattctgatgtagagacctggttccatctgcttgtgggggaaacgtttaacatcagctcctacctgggctccccaggccctcgtgcggtttggccccagttctggggtcttaggctgggctaaggtttctgggagcccatgtcccctagggtccccgcttcactgctttgttaccaccaagagactccctgtccccatctgaggtctggcagctcttagtcatgtcttggagggaggacgggcatccagggctgaccggtcaacgtccagcacctcccagggactatgggaagactgagtggtgggtctcgtcctctcgggatacttgcgcttctctttccccttctctacaacctggaaagaagcccctcaccgcgtcctacttttgcccaacacgcttttttttttgagacaaagtctcactctgtcgcccaggctggagtgcactggcgggatctcggctcactgcaacccccgcctcctgggttcaggcaattctcctgcttcagcctcctcagcagctgggattacaggtgactgccaccatgcccggctaatttttatatttttagtagagacggggtttcaccatgttggccaggctggtctcaaactcctgacctcaagtgacctgcctgcataggcctcccaaagtgctgggattctaggcctgagccaccgcgcctggccccaacacactttttttttcctgtagggcaactcacatgcctacaggagctggttccataaaataagtttcccttaactaggacagaagtagcagtgtcaatcacacgacacctgtgaaggacgggggcggtgaaaggtgactgccccacctgcagagccagccgctacttagatgtggcagattgttgccttgaaggaaagcaagaccctctgtttccagatctttcgttgttgttggttttttgtttttgtttttaagtttaggattactgaggcatatgtagtaaaatttatccattttactgctccattaattttaacaaatgtgtattgtgtaactaccaccaccacagtcaccacatagaatgttagttattgattgattgattgagatggagtctcactctgttacccaggctggaatgcagtggcatgatcttggttcactgcaacctccacctcccaggttcaagcaatacttgtgccttagccaccccagtagctgggactacaggcgtgcgccaccatgcccggctaatttttccatttttagtagagatgcagtttcgccatgttggccaggctggtctcgaactcctcacctcaagtgatccacctgccttggcctcccaaagctacttatttctgaaacagggtctcactttgttgcccaggctggagtgcagtggtgtgatcatagctcactgcagcctccaattcctgggctcaagcaagcctgccatccgcctcctgagtagctgggattgctggtgtgtgccccccacacccagctaatgttttattttagtagagatgggggtctcactacattgcccaggctggtcttgtactcctggccttaagcgatccttctgcctgcttcccaaagtgctggggatgacaagtatgagctgccatggcatgccttcaaacattaaagttttttgaaaaagaagctgggaatccagatttttatgtgacatttattaaaatgtcggcaactcatttttttaaaagtagtgaaagggtcaaaggggacatgtcagcaggttggataccgcttgtgggattccagattgcaacccatgagctttaggaaaatagaatccaaaatatcagctgggtgcggcagctcacgcctgtaatcccagcacttagggaggccaagatgggtggatcacttgaggtcaggagttcgagagcagcctggctaacatggtgaaacctcgtctctactaaaaatacaaaaattagtcgggcatggtggcgggcgcctgtaatcccagctacttgggcagctgaggcaggagaatagtttgaacctgggaggcggaggttgcagtgagccaagattgtgccacggcactccagcctgggtaacagagttaagactccatctcaaaaaaaaaataacaacaaaaaaaccccaaatctcttactggtgattgtgtgccccctgttgtgtgccttcctggacctctctgagggaggaaagggcagggcctgaaacgttctcccggccacagcctccctgttatccctcccctctgcttccttcgccaggccaaggcgaacctagacaagaataagcagacgctggagaaagagaacgcagacctggccggggagctgcgggtcctgggccaggccaagcaggaggtggaacataagaagaagaagctggaggcgcaggtgcaggagctgcagtccaagtgcagcgatggggagcgggcccgggcggagctcaatgacaaagtccacaagctgcaggtgaggaggtggcgcggtggtgtggtgggcagtgctgggtggtgcccagttctgtggggaggagcctcttcccggctcgctgaggtctctcttgctgcaaggcaagtcctttcctctagttgcgttcctggaggagaggcgatgatctccctgttcaattaaatattaaaaaaaccttctggccaggcacggtggctcatgcctgtaatcccagcactttgggagacagaggtgggtggatcacctgaggtcaggggtttgagaccagtctggccaacatggtgaaaagtctctactaaaaatacaaaaattagccaggcgtggtcgtgggcacctgtagtcccatctactcgggaggctgaggcaggagaatagcttgaacccaggaggcagaggttgcagtgtgcggagaccgcaccattgtactccagcctgggctaaaagggcaaaactctgtctcaggaaaaaaaaaaaaaaagaaaaaaaacccttccttttccaatttgataagtatttattgagcacctgctgtatgccaggcactgtgcttaatcctgagatccaacagcaaggaagaagagacactgtcgctgccccagtaggactccagccgagtaaggggaagggaagggaagggaaagacatgaataatcacacaaatgaatgtcaaatgatgcagcaaagggaaggcacatgatgcccaagtgtaaataaccagggggcctaacctgggggaggaggagccacgaaaggcttccctaaggagcatggataagtctaccaggcagagggaacagcgtgtgcaaaggccctgtggtaagtagaaaaattaggagagagacatacagccagtagagctggagtgcccagctggggttgggggtagggggagatagtacagagtggggttggagggggagcttgtacccagatgatgtagggcttttgagaacctattacatgtatgttgatccttactctgggcaatgtgaagctgttgaggggttttaagctgctgaatgacatggtctttttgtctttggtcttctttcacttggcatagccatttaccctgccttgccactcatggggacgtggccaaagttttcacaaatgtttaacatgtccacagccagggaccaaggggcgagggaagaattaagtgagatgtttttttctcacatgcagttgagagcagggcttttgccgccctcatataagcagtgtcaagatcattcatatcctccttgtcaatggaagagatggaggggtaggctaacagcctcaaagggacttatgcagagacactagggagtaaaagccagagaatacagagaggacgtttttacctttagggcctgcgtctctggctttggccatcagggtcaaagagtaggagtgaggaaggaagggatgggacagcatccctgggacgttcaagtaccatcctggtctcccttctccagccttagagagtggaccagccagagcacctcgtctggactctcagacctgctgctttgtctctaccaaccttggcagggatctaggatccatttagtgggatcaggtcccagtcaataccattggggctcaaataagttcttagaaccacagagtctagggccagggtcccaactcataggtgacggagttcccttcaagccacagattctgttttttttgtgtgtgtgtgtgtttttttttttttttatcagagtcccatacctcacgggtattttctcaatcagtgaacacctcaagtactagcccatgtgttttgagtaaaaagggctcctttcaacgaggatccccttctagaggctttgactaaccagtctcttggcacccttagaatgaagttgagagcgtcacagggatgcttaacgaggccgaggggaaggccattaagctggccaaggacgtggcgtccctcagttcccagctccaggacacccaggtgagtgtcctgccacatcatccaggggacctggggggtggccttcctcggggcaggtccctgggacctctttgcatcccttttgcaggagctgcttcaagaagaaacccggcagaagctcaacgtgtctacgaagctgcgccagctggaggaggagcggaacagcctgcaagaccagctggacgaggagatggaggccaagcagaacctggagcgccacatctccactctcaacatccaggtgcctgccccgtgtccttgcttccttcatgggtcctctcaacttctctgcgctgagatcccccgcaggcagatcgcggtggagtgttggtgcgatggtgcttgaccccccagcttcccctgctattgggtttctccaacgaggagacatggtcttcgcttctcagagtctgtggggccagggacaggggccactcatggtccccctctcaccctaccctggacgctgtccttgtagctctccgactcgaagaagaagctgcaggactttgccagcaccgtggaagctctggaagaggggaagaagaggttccagaaggagatcgagaacctcacccagcagtacgaggagaaggcggccgcttatgataaactggaaaagaccaagaacaggcttcagcaggagctggacgacctggttgttgatttggacaaccagcggcaactcgtgtccaacctggaaaagaagcagaggaaatttgatcaggtagagggcgtggggtgtcccccactctggccatggacgctgggttggggaatcagctctgcagagtatgacgcgtggctctggcctgtgcctgcatcccctctccactctgtggggagccatgggaggctgtcttatcttgtcttgggcgaccatggagcattaacgctaccaggtcacagtaaggatggcaaagaagccttgatgactgtgacttttctgggtaccagcaccatgagggtcacctgcacacatggtgatgccttagtttctagcctgaagaaggaatgaggtgcttatttattcactaaatgtatttactgaatacctattgagtagtattccaagtaattcagtttctatacttttaataccactcttccctaagatttcattctgtaaaattccaagtacacagcaaagttgacagaattgtacggtgaacacctttaaggccaccacctggattcagtcattgacactgtattatatgaactttatcagatacttattttgagacaggatctagctctgtcacccaggctggagtgcagtggtgtgatctcagctccccgcaacctccaccactgggttcaagcgattctcctgcttcagcctttcatgtagccgggattataggagcacaccactatgtctggctaatttttgtatttttagtagagatggggttttgccatgttgtccaggctggtctccaactcctggcctcacatgatctgcctgccttggcctcccaaagtgctgggattataggtatgagccactatgcccggcccacatatttatttataaagactaattctatctatcatgccttatctcttgggtacatttcagagcaaattacagatgtcagtacatttccccttccacacctcaacattgcatattaattagagtttatttttaaacacaattttgcttcttttggggtaaaacttacatgtgatgagattcacaaatcttaattgtacgataaatggagacccctgtatgacccaaacccctaaataccaacttttaagatacattattatttagtaaatatgatttagtttacaagtgactcagggttattctaaaaatcagtttgagaggccaggcacggtggctcacgcctgtaatcctagcactttgggaggctgaggcaggtggatcacttgaggtcaggggtttgagaccagcctggccaacatcgtgcaactttgtctctactaaaaataccaaaattagccgggcgtggtggcgcacgcctgtaatccctgctactctggaagctgaggcaggagaatcgcttgaacccagggtggggtggaggttgcagtgagccaagattgcgccactacaccccagcctgagtgatggagtgaaaaccctgtctcaaaaataaataaaatgaggattgtacagtgaggctaaatgccagatgcctgcaggttccctacccctccctgactgacctcctagtgtcaggattctagataacatcccagtttctcctcttcccatcagctacctctcctctgggctgtcagctcatcttcaatgcttcgttatctggttgaaggcctgaggttgcttttattttcctgtcacatagagtgtagtgcagtggcacacatagtgtgggatttttgtgttgactgtgccatttagaggtccctgtctttgctgaatactggaagtttggcttttggatgttacaatttataatctgctctgttctctctgaagatgagattaacgtgagcatggaatgttctctgagttgcttctccaagcagagagatatgtgtgcagggccacccatgcttaccatttccctactgaggctcttaggatacttttgtaagatattaatagctacttgtggccatgaaacaaactaataactagcttctggcagctttaaatctcactttgacctcagtgtgctctaagcaacgtgggcaggtctagtggtttcgaagcacaaggatttggccaggtgtggtggctcacacctgtaatctccgtgctttgggaggccgaggcaggaggctcacttgagggtcaggagttcgagaccagcctggtcaacatggcaaaaccacatctctacttaaaatacaaaaattagccaggtgtggtggtgggcacctgtaatcccaactactctggaggctgaggcaggagaatcgcttgaacccacgaggcggaggttgcagtgaaccaagactgcaccattgcactccagcctgggtgacaaagtgagactccatctaaaacaaacaaacacacaaaccaacaaaaaaaaacaagtcagctgatttctggctctgcataaggttgatgtagaagtcagaacgccagatgattatataaattactcccatagctaacctacactgcttacacctgcacctcaatacattcagcaggacacagggcttcccccggtatttacaattcagtgacgctgaccccggatatgcctagaagtcacctctgggtcttgtgttgtagttgttagccgaggagaaaaacatctcttccaaatacgcggatgagagggacagagctgaggcagaagccagggagaaggaaaccaaggccctgtccctggctcgggcccttgaagaggccttggaagccaaagaggaactcgagcggaccaacaaaatgctcaaagccgaaatggaagacctggtcagctccaaggatgacgtgggcaagaacgtaagtggctctgggtggtttttctcgtccatgtttcgcctgcccaccctctgtgctattcaccagtccatgcgaggctagctcctggcctttttcatagcgaactatcatcggaaatggaaggaggtttttggactggtgcaggggctgggaggggctgagaatggcagtcgaggatgggtctgagttggggggtccgaggataaggctggggtctgaactctcaggggtcatcttgagtcccggccatgcatcctgtgggaggccaaagccacctccctgatctcctgaggtgccgctcacggtgggtttctcaatcgtcttcatgaagttgagcctcatagaatggggctgcccgctctgccggcaggtccatgagctggagaagtccaagcgggccctggagacccagatggaggagatgaagacgcagctggaagagctggaggacgagctgcaagccacggaggacgccaaactgcggctggaagtcaacatgcaggcgctcaagggccagttcgaaagggatctccaagcccgggacgagcagaatgaggagaagaggaggcaactgcagagacaggtgcgtgctgccggggaggccagcagagggaggtcgggtggcctttttcattcctatcaccactctcatggttggtgtggaaacttcgttttctttatttttttttgaaacagagtctcgctctgtcgcccaggctggagtgcagtggcgtaatctcagctcactgcaacctccacctcctgcctcagcctcccgagtagcttggattacaggcgcatgccaccatacctagctaatttttttttttttttcagtggagacaaggtttcaccatgttggccaggctggtcttgaactcctggcctcaagtgatccattctcctgttggcctcccaaagtgctgggattacagacatgagccacccacgcccggcgtgattccgttttctcatctgcaactggggatgagatgcccacctcacaagggggctgtgctggggaaggggtgcagtgatgtgctgcctaggtgagccaaaggacctcccaggggcaagtggggcagcacacatctctattcctcgcccagcttcacgagtatgagacggaactggaagacgagcgaaagcaacgtgccctggcagctgcagcaaagaagaagctggaaggggacctgaaagacctggagcttcaggccgactctgccatcaaggggagggaggaagccatcaagcagctacgcaaactgcaggtgggtgacactaggagcttggggcatgggtggagggagggcacagttcccctcaggccaccgaagtcagcagagcgggctccaggaagcaagcctgcacctgccattggtgtgggttcagctggggtttttctggaaccattcaggatttggtggctgtctcctgccctgggtagggcagcattattaggtatttggccactgccctcagatcacatcaggggctcagcttctcaggcaggtctgtggagcccacccagaatggtgctcccagcgcaccaccagccacctggaactgagagccatgctcgtgcaatgggaacttctttgtggtcaactgcagaaaatccaaggggtgggtgtgcaaagctgaactgggcagcagaacttgggggagtaaggacatctgagcttgtcctccctgttgactcatgcaggctcagatgaaggactttcaaagagagctggaagatgcccgtgcctccagagatgagatctttgccacagccaaagagaatgagaagaaagccaagagcttggaagcagacctcatgcagctacaagaggtaaagcctcgccttgctaggagagcctcagatgcgggtgtcacggtagcaccccttggcagctccagtctgtgcattcccagatttcatttcgtcctcctctggggtccacctgtctagaaagacacacgcttccctcctctatgtattcacggggcctcccctgagctcagaggaagaacatgtactttcaagggtggctgagttgtcagggtggactcttggtggggcttggcctttccctggcagacaacagccttcctccctcccacctaggacctcgccgccgctgagagggctcgcaaacaagcggacctcgagaaggaggaactggcagaggagctggccagtagcctgtcgggaaggtaggaaactgaatggaggaagagggctctgaagcagaggatggggggacaggcagcatcctcgacccccattttattttttaaattttttcgagacagagtttcattctgtcacccaggctggagggcagtggcacaatcttggctcactgcaacctccacctcccaggttcaagcaattctcctgcctcagccttctgagtagctgagactacaggtgtgtaccaccatgcctggctaatttttatatttttagtagaggtggggtttcaccatgttggccaggctagtcttgaactcctgaccttaggtgatcctcctaccttggcctcccaaagtgctgtgattacaggtgtgagccaccgtgcctggccctggacccccatttcaatgctgctgctgacgaagcgtcctctgagattggggacagacccatggtggttaggttttccgtcagcgctttcatgcctgtttgggggtgtggctgctttcattcattcccaataagtagctgtgtggggagaaggggaggccaggaagagtcagggaggagtgtgctggtccccatcccaatcccagctttgctgacacggacccggcctgagtcccggctgtccacttcctggctgtgtaactacagatgagtcttctaatcttctccaagcctcagtttcacccattagatgatgagggcaatacccctgaggcatgactccaaggagggggcatcttttaaggcgggggagggtagaggcccccaccatggccgcccttcccccaggaacgcactccaggacgagaagcgccgcctggaggcccggatcgcccagctggaggaggagctggaggaggagcagggcaacatggaggccatgagcgaccgggtccgcaaagccacacagcaggtgagggccgcctggacaccacagtcacgctgcctactgtctctcctgcagcaggatcctgcaccagtcaacacacgcgtggcggcttcctgtgtgcaggccctggattgagggacaagagggtggtggggcctgagagtagagatccagggcccttacaccagtgcccaggctgctgtcttcagaatactcctctccacgctgcagtgtctcattttccagccacggcgtggctggctccccgtacctcacggccatccctggagtccgggccttgggatgctctttcattgcgttttcccctagctgaagctctgaccttatccagtgagcccttggtgatgtcactgagcactagttccatggtgggcactagggaccatccagtaacctgcagccccttgtggtgtagggtgaacaggcatcattctccaggcgactccaggacagagaaagcaagggacaagtcactcgctcagcctgggtggcactgacacttgtggaagcacctcttttttttggagacagggtctctctgtggcccaggctggagtgcagtggcgcaatcttggctcactgcaacctctgcctcccaagttcaagggattctcctgcttcaacctcccaagtagctgggactacaggcacgtgccaccactgcccggctaatttttgtatttttaatagagacggggtttcaccatgttggccaggcaggtctcgaactcctgagctcaagtgatttacctgcctctgcttccaaaagtgctgggattacaggcgtgcgccaccacgcccggcctggaagaagctcttgagtggagttttacaggatgaaggagaggacagggtgcccgggatcaagggactcgtgcagaggccaaacaaggcaggaagaggcatggtctcagtgcgctctcttgggcttccctgagtccgcctcatggccttcactctcctccccaggccgagcagctcagcaacgagctggccacagagcgcagcacggcccagaagaatgagagtgcccggcagcagctcgagcggcagaacaaggagctccggagcaagctccacgagatggagggggccgtcaagtccaagttcaagtccaccatcgcggcgctggaggccaagattgcacagctggaggagcaggtcgagcaggaggccaggtatgcgggtgtggagttccgaacccagtttgcaggggggtgatggacagcaggagtcatagtgaagtcagggaacctcttccagcatcagttctggcttgtaagaagcaagctctgtgatgcctacagtgcaggtatgttgtgagaactgaacgtaaacacagcaaagtgccctgctggttcctggcctagggcaagcacctaaagtgtgagctgctcttagcatctccatggtcctcctgacattaacctgccttcccagcagtacatatgacttttcccagcctctgcagggatagcatgctgacagatcaaaaatccaaccaggctggacgtggtggctcacgcctgtaatcccagcaatttgggaggctgaggcaggtggatcacttgaggtcaggagtttgagaccggcctggccaacatggtgaaaccctgtctgtaccaaaaattagccgagtgtggtggcacatgcctattatctcagctactcaggagactgaggcaggagaatcactccaacgtgacacgtggaggttgcagtgagccgagattgtgccactgcactgcagcctgggtgacacagtgggacccttccacacacatacacacacacaaaaaaaaccccaaaaaacaaaagtccaaccggcagcccatttggtacacacactggaagccttcttaattatgggtcgaatgaggcatatgatcacagcacatttcttaccattggattctaaggattctcacccattctcttctagtagctttttcagtaattcgcacgccctgcaatgcacccatttaaagtgtataattcaagggctattcatatattcacaaacatgtaaaaacgatcaccacagtcattttgagaacattttcatcggctcaaacagaaaccccaggccatatgtggtatttcatgcccataatcccggcactttgggaggctgaggtaggtgggagcagcacttgagtccaggagttcgagaccagtctgggcagcatagcaagacttttttatttttatttttttgagacatagtctcactctgtttcccaggctggtgtgcagtggtgcgatctcagctcactgcaacctccgcctcaccctcccaagtagctgggactacaggtgcacaccactgtacccagcttgtaattgtattttttagtagggatggggtttcaccatgttggccaggctggtctcgaactcctgaccacaggtgatctgcccacctcggcctcccagagtactgggattacaggcatgagccaccacgcctggccagagactccgtttctatgaaaaacttttaaaagtctgagcatgctggtgtacgcctgtagtcccagctacttgggaggctgaggtgggaggattgcttgagccaggagttcaaggctgcagtgaactatgaactagggtgaagagcaggcattggagcaccactgcactccaacctgggtcacacagcaagaccttgcctcctccccgcaaaaaaaatagaaaccccatgccctgtaaccactcccttcagtccctggcaaccataatctactttctgtctctatgaatttatctattctggacacttgatatcaacggaatcacacactatgttgtctgctatgtgtcttctttcacttggcaagaattccaggctcatccatgctgtggcatgcattgatactttattccttttcatggctgaatactattccaccatctgactgattcttgagaggagtccagatacggggctcaggaaagcactcaagatgccacctccaggtgacacaccagctacaaggggtgccaccctccgctgaaaccacctgttttccttgctgtttgcagagagaaacaggcggccaccaagtcgctgaagcagaaagacaagaagctgaaggaaatcttgctgcaggtggaggacgagcgcaagatggccgagcagtacaaggagcaggtagcccctgccacccagcctccctcgagcccccagcccccagccggcctcccctaaccacccctccaactctccgcgacaggcagagaaaggcaatgccagggtcaagcagctcaagaggcagctggaggaggcagaggaggagtcccagcgcatcaacgccaaccgcaggaagctgcagcgggagctggatgaggccacggagagcaacgaggccatgggccgcgaggtgaacgcactcaagagcaagctcaggtgaggagcccgtggcccgggaggaccccgtctctcaggccagagaaaagcactgggggctcgggctcctttcggcctgcaaatgccccttgtgcccacagccgccactcccttctgtggtttattcctgcttctccttaatcactaagcttagtgtgggccaggcactgagatcagacccgggccctgccttgcctggtagcagctaaccttctagatcctttaacgatcgaccgtctcccatccggtcctccggctgaggaggaggaagaggctatccccactgtctcctccagcccctccttcattgcatcactgagtcttcacgacatccattgaagctgcaacaccaccccccgccacttcacctccttcctgacatgctctgctcctcctttctccccctcagcactgctgccatctgggctgcattattctcgggtatgggggctgtccgacattccccatcagaaggaaaaagatccctgaaaagtagcaggtgcttacatttctggcctctacccaccggctgcagtagtcccccaccaccctgcaatgtgacaaccaaaaatgtctctagatgttgccagaagtcctctagagatgggagggtacgactgccaccccgctgagaattcctgctgtcactggagtgggggctgttttctctcccatgcctctggtaccttgggggtcccccctgctcccaagggctgcttccaccaccctgtccatccatcccgattggctcccaggaggttttagctccgggcttcctgtctcccacaccactcctcacagttctccatgatttcaacatccaggtgggcgacgcagcctctcggttccttgaccctctgggtgatcctgctgcttctaccgggccaaccagtactcctaggagccctcacaatttgaccctcaggcatcccattgtctgcctggtgccacctttctttggctctgtccccaacggggtcttcactccattaatgccatcagcctctgacccagctccaaaccagctgtctagtaacccccgtcgcgcatcctcaacatccggttccccctcttgcattgctgcaatcatttggtgaaagcacaacccaaatgaaactcaagcttggctgggcacgggactcacacctataatcccagcactttgggaggccaaggcaggtgaatcgctttgagctcaggagttcaagagcagcaagaccccatctctacaacaaacaaacaaaaatcagccaggtgggatggcgcaaacctaaaatcccagctactcaggaggctgaggtgggacgatcagtggagccccagaggtcaaggctgcagtgagccatgatctagccaatgcacttaccctggatggacagagtgagaccctgtctcaaaaaacccaaaacccactctccaccttttcccacagagcaggccttgctcaggggtcctcccacacccctccctcatcttctcactctctgctgcttttcactttttctttgaacttatgatcgctcctccccattctctctcagctggggaccttacttcctacttaactcaaaagcagaaatgatcatgaaacgtgcacaagctcccactgcctcatcatcctacctccgtgcacctctgtacacttctattttttttccatttctatgctgaaccctctggcaccaaccgaggccaacacctccattggacccgaccctcttgttcactcaagcacatagctccaaaaatccttattttgcaaggttttctctttcatttgctccatcagcaaatggaataacctcttagccccatgtctaccttgctacccttactacaaaactggatgtgaatgccgaaaccctgtctctaccaaaaaatataaaaattagccaggtgtggtggtgcatgcctatagttccagctactcaggaggctgaggcacaagaatggcttaaaaccgggagagagaggttgcagtccagcctgggtgacagagtgagactcggtctcaaaaaaaaaaaaactgtatgtgaagagttgctggttcccctcgcccccacccatcactctcccagaagcctcccatgggtgacactaatggccagaggtcccctgacagggcagcagcacgtgacgcagtccatcatgcctctggcctaattcacttgcttccctggacttccccgacaccatccacacctgcttgtcccccgacctgtggggttgtccctcttcctctcctctgctgatccctcacctcgaaacctgcttgccactagaccgccccagggtatcaacttagttctcttttgggcagagtcttgctctgttgcccaggctggagtgcagtagcactatctcagctcactgcaacctctgcctcccagttcaagctatttttggcctatttttatatttttagtagagatggggttgcaccatgttgcccaggctggtcttgaactcctgatcttgtgatccacccgcctcagcctccccacgtgctgggattacaggcatggaccactgcacggccttagttgttttcatctctccccagcgctaggtgagaggtctcaactaatcttggcgctttagaattccatgtatatctaatgactcctcagttcatctctgagaagccctagcttcttcctagaacctcagaccaccctcccgttcccacatggatgtctaataggcagctcacaccaaacatgctgcaccccaagtcctgactgaaactcttcacccccaaactggctcctctctccagctcagcagctaaaatgatgaagttgccaacaattcacatcacaaacctcgtggtccttcttaacgttttggtctcctttataccccacatcccatctatgggagaatctggtcaactttccctaaagaatcctgcccaggctgggtgcagtggctcaccccttaatcccagcactttgggaggccaacgcaggctgatcacctgaggtcaggagttcaaggccagcctgaccaacatggtgaaaccccgtctctactaaaaacacaaaaattagccgggtatggtggggcgtgcctgtaatcccagctactagggaggctgaggcaggagaatcgcttgaacctgggagacacaggttacagtgagctgagatcgcaccactgcacttcagcctgggtgacagaccaaaactcggtctcaaaaaaaaaatctccagtgtctaggacagcaccaggcagagtgaacctttatccctcgggtcctagatattttccccgcttcattctcataccaccacagccatgtgctgagcctcttactacctttaataccaatgacttgatcttttaacagttttaatcatacatgaatataacggcaaataaacatacctcctctatatttttaaaccagcatcacctctatcaactggttacgatgaaagtaatatgataaaaatagtatcaagttcaatatctagctattgtggccacaacttgatcaccaagacctgaagcctacttctccactaaaaagggagtgacaacagccattagcaccaaatagactctctctgacatcataattagacttgtttaaaaagagttggaaaggaaatgactttctcagggcccagttcagttagcggatggcatgcccggaagccatctgaaatcacctctagagtttggggaccactgcgtgagacagggaaaagtccaaacccctctgagaaggggaagagagcagctggcgcagggcaccaagccttcagggaaaagccccactcgctgcatggtgagcgcttgttggtcccccatggataggagagaaaccaggcctaggctcccaaagtacagcaggggcctggaagcatctcccagggttgaggggtcagtggaggagagctgttctcactgtgaagactcctggggcaaagcgcggtggctcacgcctgtaatcccagcactttgggaggctgaggtgggctgatcacctgaggtcaggagttcgagaccagcctggccaacatggtgaaacttcatctctactaaaaacacaaaaatcagctaggcgtggtggcagatgcctgtaatcccagctactcgtgaggctgagacaggacactcctttgcaacccaggaggaggagcctgcagtgagccaagatcaagcctctatactccagccttcagagcaagactctgtctccaaaaaaaaaacaaaaaacaaaaaccctcagatgtgctctgctggcaaccagtccccctgcctctcctgagtggctgggctgagcgatggggatacagccactctgactccctaccccactgctgtctctgcttccctttctcaggcccagtgatttcttttctttttattatttatttttagacggagtctagctctgttgccaggctggagtgcagtggcgcgatctcggctcactgcaacctttgcctcccaggttcaagcgattctcctgcctcagcctcccaagtagctgagattacaggtgcgtgccaccacacctggctaatttttgtatttttagtagtggcaaggtttcaccatactggctgggatggtctcgatctcctgacctcgtgatccacctgcctcggtctcccaaagtgctggggttacaggcgtgagccaccatgcccggccggcccagtgattctttagcacacactggacacctcctgtgggttctgccccagacacttgagccttcttgggcagccaagggcaaagtggaacaaaaagaccatttttgccagttccgacacgaatacacacataatgcaggtggaaggtctgtcctgccttctgcatcttttgggtgcacaaaaacataaaatcaggcactagagccctgagggaggttggtaagcatgcctggctcctcagccaagaaggaactgtagtgcgagtttcaccaagttctatcagccagacgcatctcgacacaagccctctctaaagccagacccacttacctaccactggctacactgccagttacctccggcaagagctgtacaaggcctccacctctcctctcttgctagaggcccgaaagctaatgaagagcaagtaatcataaaccaagggacaggcggctgcaggttccttgcctgggacttcttggcttctgttccaacactgatttctcaaactagcttgctcaaatgcttttacttccctgaaccagtatgcaatcatgggatttataggaggttcttaaaagtagctctaaaggacagacattttcctttccatttaaaaaactgagccgggtgcagtggctcacacctgtaatcccagctctttgggaggccgaggtgggtggatcacttgaggtcaggagttcgagaccagcatggccaacatggtgaaactccgtctctactaaaaatatgaaaattagccagccacggtggtgcatgcctgtaatcccagctactcgggaggctgaggcaggagaatcgcttgaacccgggaggtggaggttgcagtgagcagagatagatcatgccagtgcactccatcctgggtgacagagtatcaaaaaactgcttatcctttcatctaccagcctcaccaaatgctcttggcgtcaggtgattcactgcaacgttgacttaagggtgcttttaatgccaggtgcggtggttcatgcctgtaatcccaaatcccagcaccttgggaggccaaggcaggaagatcattgacatcaggagttggagacaagcctgaccaacatagtgcaaccccatctgtactaaaaatacaaaaattagccaagcacgtggggcctgcctgtaatcccagctactcgggaggctgagacaaggggatcacttgaatccaggacgtagaggttgcagtgagccaagatcgcacccctgcactccagcctgggtgacagagactatctcaaaataaaaaagagtgcctttaattattaaatcgaagcaaatgtctttaacaattaagaatatacttaaccgggctccttcttgtttgctgatggtaacctccggggattctctctctgtttcagagggccccccccacaggaaacttcgcagtgatgcaccaggtatcatgccttcagcttcgcagctgtgtgttgtctcagtatccatttcttttctgcccaatgcgcccctctgcccaccccaatttttaaacccttgcacatttccacgagattcttgcaaaatctggaggcttggatatctttgtgcaaagctttcattgaaaccaagatcaggatgacaaatagacctcatctcttgacccactgtccttcctgcctctgggcagcacatgtgacatgacacccaacagtgtgcgcccttatcactgcatcttgacgagatggcagaggctgtgtgtgtagcttggatttttcttcctttcatgccaaaagccactcttacgtggttagggcactcagcagtgctgtcctcccttgtccagtgaagacactgcactgaatgaatatgacagttccactatctgggcacattcctggagaacgtacttggcttctagttggctggtctgggtcacaagtcagagatcacaaagttcacggtaactgcggcgcggcaaccagtcctcccatgattcagctttcacaggcttgtctgcgaaggaaatgagctcactgcgatgtctgacaaatgccgggggctgcacgtggcttgagtgatgtctagctacaaactgcattttcagcacacggggtggaagctgaccaccgcaaagccaagcacagtcctggcagagccttttctggaggcttcacgggcatgtacatgttcagggactggggagtggatacccaagactcaaggatgcacacagggcccttcccaagaaagcatgaagaggtctctgctgctctgggattttgcttttttttttttttttttttgagacggagtctcgctctggagtgcaatggcgcaatcttggctcaccgcaacctttgcctcctgggttcaagcgattctcctacctcagccttctgagtagctgggattacaggctcccgccacctcgcccagctaatttttgtatttttattagagacaggatatcaccatgttggccaggctggtctcaaactcctgacttcaggtgatccgcgcgccttggcctccccaaatgctgggattacaagcatgaccaacttttcacaggtgaagttaggccatgtggatctgacttcacctcatggagaggccaaaccaaccctcatttgtgtccatcttcatttttggagaatctcagctttgctgtcactaccaaaatacttaaagcgcagggtgaggtcttgttaagagccagttttgtgggggagcagatgagtttctaggacacttcaagcagctctcctaccagctgattgggatcataggataagccaaattccagggtgggctgaagtgcagaacccactggtcagtgggaaactgagtccttgcaaactagcaggtgcttacactcaagatgattcccgaggccttggataagctgagtccacgaatagaatccaaatgctaggccaggcacagtgggtcatgcctataatcccagcactttgggaggccgaggcgggcagataacttgaggtcaggaccagcctggccaacatggtaaaaccccgtctctcctaaaaatacaaaaattagccaggagtggtggcatgtctgtagtcccagttacttggaaggctgaggcaggagaatcgcttgaacctgggaggcagaggctgcagtgagccaagatcacgccactgcactccagcctgggcaacacagcgagactctatttcaaaaaaaaattccagattctccaggatcagaccctttaagaaaacctttaggggggtcccttagttcctgtaacaggtatagttggtgtcaaccttggtctaggatttgaaaccagttccaagaaaagcacttcagccaaaacagagtatcttgcaggctgacagccaagcaaggagcttcaacggcccagggcacaatgtatttcttaggtcaagggagcaaatttatccattaagcttttccagttagcaaatagactcttccaagagccaaaaagagagtgcctagagcactgatgtggaggttagggactacttcccagctcatcagatttttttttgtttttttttttggagacagtcttgctgtttcccaggctggagtgcagtggcacaacgttggctcactgcagccttcacctcctgggttcaagcaattctcctgcctcagcctcctgagtgactgggattccaggcgcctgccaccacgcacggctaatttagtatatttagtagagacggggtttcaccatattggccaggatggcctcgaacaactgacctcacgagtgatctgcccacctcggcctccccaagtgctgggattacaggcatgagtcgcagcaactggccaacccatcagggtttgaacctggagttaaaactgtgacgaagagagctgtgtggggagcgtacagggaacagtcaaactgctgctcctctgcgctgaatttgagcatccttctgagtcaagcgcttggaaaacagtgctaaaaaagaaaaagacttaagggtcacatctagagagagaaggatggagagttctctagtagggctgcaagtccagaagcttctctgtgaagctgggctaggagtgtttactttgaagtggctgcagctttaagtatttattcctgatcgctgcactgcgggaagtcccatcctttatagccaggtgggctttcccagccggggtctctcccatcctctgtcaacaaaagggtcatttgcgaattcctcttctcagtgatcatgaatctctgggccttgatttttttttttttttttttttgagacggagtctcaccctgtcgcctaggctggagtgcagtggccacatctcggctcactgcaagctccgcctcctgggttcatgtcattctcctgcctcagcctccctcccgagtagctgggactacaggcacccgccagcacgcccggctaattttttgtatttttagtagagacacggtttcaccatgttagccaggatggtctcgatctcctgacctcatgatccgcccgcctcagcctcccaaagtgctgagattacaggtgtgagccaccatgcccagccgagttgttccttttgactaaagaattggtcactgagttgtgttcatccttatggcttcttatccaacccttgcgtggggagcaaaagtctgctctcttctttgatgtcctaaaataagacctgtcttccgattcaggtcaaacagggccagatggccagagcccaacataattatttgttgcggttgctgaaaagagttaagtgtttcttctgaacggtgaaggctggcagcaggcagatctgatttttccttcttctgcccactctcttcctcctacccaaagtctcccctcacgtgaccagcccttcctgtgaagtcgaggtgataaactcaagagagaaccagcgcagagaggagatggcagcattaaggagagacaggggtgtcctactggctggagctaaaatccacctcagaggccaggtgcactggcacacacctgtaatcccaacactttgagaggctaagacaggtggatcgtttgaggccaggagttcaagaccagcctgggtcacatggcaaaatcccatctctgctaaaaatacaaaaattagccaggcgtggcagtgtgcacgtgcatgtagtcccagctactcaatactgaggctcaaggactgctggaactcaggaggcagaggttgcagtgagccaagatcatgccactgcactccagcctgggtgagagagactcttaaatttcttttttaaatccaccttgaaggccaggtgtggtggcccacgcctgtaatgccagcgctttgggaggccaaggtaggagaactgcttgagctcaggagttccagaccagcctgggcaacaatatcaagacctcatctcaatttaataaaataatccaccttggattaacacgtataatttccttttctaatattcactgggcacctgttttacgccatgtgcggtatgttccacgatcagcaaaacagatgcagcagtccctgcagtggggaaaactcagtccatgaacattcacaccagcagggggtgctgtctcgccttttaaccagggagcccctctgtgtccttctcaaggctgcccttgtccatttcaccttcttccaattcaaatcttgaaaactcacctctaaggcgaatgggggtgaggagatacagaagaaaaacagtatgttctctcttcaactctgccccatgggctatgaataaagtcagaagacaaaatcccctgcttggtttttggcgtttttttcctattctaaatcaaagaccacagcagaccagaatcctgtggcttctcaaatgaccaagcctgacatattgaaaagcagatcgtcttgctttgaaaaaccttctccacccacccccgcaaccaatttcagctgattaaattcaatcactcatgccttaagactggcaatgatttgttgacttcaacttgaatatctgcatcttatttgtgccgtgtgtgttttctgccataaaaaaaatttatattgcaataggactatagctacaagtttaaaatagatttataaaaaatctatcccaaccatgaagatttctttgctaaataatgtgttttcttacaacccacaggcgaggaaacgagacctctttcgttccttctagaaggtctggaggacgtagagttattgaaaatgcagatggttctgaggaggaaacggacactcgagacgcagacttcaatggaaccaaggccagtgaataagcaactttctacagttttgcaccacggcaagaaaaccaaaaaccaaaacaaacaaacaaaaaaaacccaacaacaacccagaacaaagcaaaacccagcagactgtacttagcattgtctaaatccattctcaaattccaaatatcacagacacccctcacacaaggaatataaaaaccaccaccctccagcctgggcaacgtagtaaaacctcatctatacaagaatttaaaaataagctgggcgtggtggtacacacctgtggtcccagctactagggaggctgagccaggaagaacgctccagcccaggacttcgaggctgcaatgagctataattgcatcattgcactccagcctgggcaacagagaccctgtctcaaccaccaccaccaccaccacccctactacccctgtattcaaggtaaaaattgaagtttgtatgatgtaagagatgagaaaaacccaacaggaaacacagacacatcctccagttctatcaatggattgtgcagacactgagtttttagaaaaacatatccacggtaaccggtccctggcaattctgtttacatgaaatggggagaaagtcaccgaaatgggtgccgccggcccccactcccaattcattccctaacctgcaaacctttccaacttctcacgtcaggcctttgagaattctttccccctctcctggtttccacacctcagacacgcacagttcaccaagtgccttctgtagtcacatgaattgaaaaggagacgctgctcccacggaggggagcaggaatgctgcactgtttacaccctgactgtgcttaaaaacactttcactaataaatggttataaatcac

SEQ ID NO: 108 - DNA, 2249 bp, Homo sapiens
gccacccggctggggccagttgtgtccaaatgaaccaatgaaattgattcaaccagaccttggacgctggtagattccacaaggtcctgctccatggaaggccccttggcaggcagccagcagcctaccctgaccacaccctgcccttgtttcccagccttccctacaaggctgtatcagggttccgggaaatgggggctggggaccccgggcacagggcttggcttagagtaggcccaaataaatggcagctgttcttagtactactggatacgcagcatgcctagcacaaaacaggacacctgtgattaggcatgtgaagtgtgcagcagggcaccgatgggaagttcatacacccgtaactgtgaatacaacagctgtggctctaaggaaatgaatacagtagcaggtgccaaacacctgtgcgctgtatgtggttttgtttttctgcgttgggttgggctttgtcctccttccactcacttttcttacctctcccctcctctttccaaggccacctgcctgtaaatgtgctccaagtgcaaacaaacttttttccactcatcctgacatccaaaagtttgtgtctgagaaagcagtgtccaccaatccacctatgtccgactcatagggctgtctgtttattgtgcagatttgtagatgccagtgagccaagatcgggccactgcactccaacctgagagaacgagactccgtctcaaaaaaaaaaaaaaaagttaaataaaaaaaattaataaaaggttcagggacctgggaagtgggggtgagagagttggattctgctgcctcctaaagcttgagccacagttctgtgggcacccaccaggtacctggccccaacaggaaagtcctgattcactagacccttgcccactttgccctcctatcaggcaattcaaagtctccagacccgcaagttactgattaaccctaggttttgagaaaataaataataataactgaagggacgacgtaagccaagaaacaagctgggcagctctgggagagaggagtgtcagacagctgttgtcaacaggcacctggccagagtgaaaaggaggggcagattccatccaagtcccagcggcgccagctgacactctctgccaatgcccaggtgctgagcgacagtgtcccaccggtccctgtgcccagaatggcctgcaccaagaccctgcaacagtcccagcccatctccgcaggagccaccacaaccaccaccgctgtggcccctgctgggggtcattctggctccacagaatgtgacctggagtgtctggtgtgccgggagccctacagctgtccccggttgcccaagctgctggcctgccagcatgccttctgcgccatctgcctgaagctcctgctgtgcgtgcaggacaacacctggtccatcacctgcccgctgtgccgcaaggtcaccgccgtccccgggggcctcatctgcagcctgcgcgaccatgaggcggtggtggggcagctggcccagccatgcacagaggtatcgctctgtcctcaggggctggtggatcctgctgacttggcagcaggacaccccagcttggtgggagaggatggacaggatgaagtaagtgcaaaccacgtggcagcccggcgcctggccgcgcacctactcctgctggccttgctcattatcctcatcgggcccttcatctacccgggtgtcttacgatgggtgctcaccttcatcatcgccctggccctgctgatgtccaccctcttctgctgtctccccagcacccggggcagctgctggccctcctccaggactctcttctgcagagagcagaaacacagccacatctcttccattgcctgagtgccctctgatgaggctatccctgcagccctttctgcccttgggcccccggacttccacaatgaacagggtaaggggttacggactaagactggctcctttgggaaatcacatgccagcgggacttgcaagccacaaccgagatggccagcctgggtcaagaattacacgcttggatgacaggcttgcacttgcccttgggatagcatagctaaaactgttggtggctaggggagcagacacaaactacttgaacatgacaagatgggggaagctcctgttcctcttattccaatgttcttggtttttctttatataacttgatgaaagtattgcagtattgatgccattgtagaatagaactggaattccattctttttgcaattt

SEQ ID NO: 109 - DNA, 18476 bp, Homo sapiens
cctaggtatgccagatgccaatttttcttggccagccagggaacgtctcatgtctttggaagaaattatctttctcttactggattcttctgagaaaagtgatttgttaaaagttttggttatttcaaatcaatatgtactcaactaggacgtctcctcacccacgttaattttttaaagaggaggaaagtaggagaagatgagcgcttcatgtaaggctctgccagcctacgaggaaatgcaatcctccaggctcgcccgagcgtgggctgcgggcaggggactgtggggccgttgtctcgttttattccacggccgtgcagcagagggcgcgtgcctctcagcactcatgctgcgcgctcccctgcgcctctaggatcgtatccctatttgccccaaggtcatagctcctaacccagcttgccagccccaggccggggacaccagagactgagcccttcgcgctggagaccccggcgcgggtggggcgggagggctccggggccaagagacaggtcacaatggggacaggggacgaaaggcgccgggggtccgggtcccgagcagtccccgccgccgccagactccgcagccgggagggggatggggtgcgcgtagaggctccgcggcccgggttggacggaggagcccaggagccaccgcagccgccgcacgcccagagctccgagcttcgctgccagcccaggacaccggggccctgccgtgggccgaggggagccgggcggcgggagaggagccccggagccccggagccccggagccccgccgggcgccagccgagagggcgttttccccgcccccggagactcgcccgcccggcccgccccgccccgagcgcggggagttcacctccgcccgtcaccacctccccttgtcgcctaggtccacccgagccccctcccccgggccgcccccgagcacgaagttggcgggagcctataaaagctggtgccggcgcgacccgcggacacacagtgcaggcgcccaagccgccgccgccagatcggtgccgattcctgccctgccccgaccgccagcgcgaccatgtcccatcactgggggtacggcaaacacaacggtgagtgccggcgacggccagcgcgggggcgccccgatccccgatccccgatccccgatccccgagcccggatgccggcccggggcccgcagcgcccgcacatgctgtttaccgcggccgcggggagtgctggaggctcaggtgcgccccgggcgctcgctccgctcgcggctccgcggcgccggggatgtcccccttgccccagctgcgaggccactgtggaggaatccccgcgtccgccggaggcgcgtagggcccgagggaggggaggcgcagccctggccgcgggacccgaggacagtccctcccgggtcccgacctggggatcattttaaccggacctaggaggaggcgggaaagggttgtaacggaaaattctagttgttgatcgcagagaaattaagagactcccctcccccctcccccaccttccacccccaccccacccctccagcttcagcaccacctgtggctaaggcgctcagcacgaactgtcccggggcattttccagtgctggtttgaatccatggctctgatttccgagttttcccttcatctctcgacttctaatgttagggggtcggacatcaggaatcgggttttatcttggcctcagatctggttcttcggagccagcggagcagaggagcatgcgtctggcgcacctagcgcatctttggagggtgtggggcttcccaggtagtggggaaccctgacggttaaaggtggggtgggcccgggcctgggcagtgaggaaaggatccagacctccttgaatgtcttaagtgagcttgcatatcccaaaatcgcaaccacaagccctgacattagtgtctgcccgatttcagttgctgaatttcagtaaaacgaccttaaaatagctaatatttatatagcactcagtgatctaagagctttacatatatcgattctaattcttacagcgacatctatgaggtagatttctaattatcccatattacaaatgtggaaactgaggcacagattacgtgttttcccaaaatttagcccattgttaagtgatgcttctaaaattggaactgagcagattggctccggaatgattgctcttctctaggggtctgggtgtacctttccccacaatgggggattcacatgtcttctttcccccaggacctgagcactggcataaggacttccccattgccaagggagagcgccagtcccctgttgacatcgacactcatacagccaagtatgacccttccctgaagcccctgtctgtttcctatgatcaagcaacttccctgaggatcctcaacaatggtcatgctttcaacgtggagtttgatgactctcaggacaaagcaggtcagtgtttagaaaataacttgtgtcttttagccagtagctgttttccgagcttaatggaaggagccaggaacagtggcaggaaccctcttaataatacagtttgtctcaggactcaaggatgccaccctgatcattttcattaggtctcagattctgagaagtaggctaattagtttgaagtgtcccggggccgtttcttccctgtaaaacccttggcttctatgaaggccattgaataactgcgatatgcctgtgaaaaatcacaaaaggtgcaaagtcccctcgcaataaagatcagtcacgatgagatttgcaccaattgaacttttaagattgtaaaatattttgtcttgcagagctgatgcatatccattaaaaagtatatcttagtgagccttatcttcaagttagcagcgagaagagtaacaaaaacgtgccaatttaaaatactgaaattctgggaaaatgttttacttatgagtatttcttagtattgggctagtgtgataaagatggcagcatgttttgatatctactcagaaattcatttcacaaacgaagatgttttagagttggtgaacatacctggcccattactgacaaaaccaattaccgtatttattggtaatagagctgtttacaggatgctcactgtaaaaaaaaaaaaaaaaagaaagagaaagaagaaaaaaaatcctgcttttttttttttatctctctctcttttgaaacaagagaacaatcccattcacacatagtagctgccttctttgctaagcagttaatttaattgccagtgccctattttcctgagtgctttcctctgaaggtcatagaatgaaatggtgctgcaaacacattttgtttggtggtggtgtgggagtgaggggagtggtggaacaaaatgagaaagttttggagtagtgacctacggtactaatatattatataatatgtaattataaccatttagtcaggtagactattctttgtcagcagctatcctatatagtcaacttggttttgaaaaaagaattcttccctcctttcaactttaaaaaaatttgcaaacacctggctttctgaaatggtgattctggaagacaatttgatgggggataatgtggagatcatctgagaaatgttttcaacctacctgtgcctgtctgtgtgcacccctccccagtacacacatacatacatacatacacacacacacacacacacacacacttacaatcatactcacactttctggcatagtatgatgatttattagaatcaagtaaaggttgtacattgaaaacagttcggtgattctgctacattgctttcccaagcattcctctcactccaaaggaacagtgctcatataattaaattaaacaatttttttcttgtaaagaatactgtatatttataacaagacaaggccaaaggtctcaaggtattacacatacagaaagaatactataacatttcacgtctagtcatttacaaaccaaaagaagtgagctactttagtctgtagctgtacttttttaaagagccacaatgatgtcattgttttcaatggatgtaatgtctgccaaattatgtatctcattggatgctacatagaaattggatagtttaagtcttttttggagcactgaagaaacaaatctccaacaaatgaaagcagatgaggttcctaatagtccttaaaaaatggatagtgaaataaattattctagtaatatgtattactggaaagtggatttgaacacatggtctggtggctatcagcatagactggggtcagagagacctggatttgagttctagagctgccggcaactagctcagagactttgggagtaatactgtctaggttttaattgtttttaactgtaaagttggagtaacaatagtgtctgccacagtggaaggatgaaatgggacagtatatgtaaagcccctagcccagtgcctggcgcatagaagttgctcaataaatggcctctgttgttgtcacaacttgaacccttcgaccacctctgttagaccattgctgtagatgttgcacctgcgataagatttctgaataaactttttctttaacagctttaagattagttcccatcatttgatgtattttaaatttttatttttatattttctgaagcatactgtttatcatactgaatatgtacttattttatgtatgaagttattatatagttacatattttaccatgaatctgttaaactttgacagatttctctataagcagtaactaattagatctagctacatttttcacagctatttcttctggagagcaatgcatacatttttaaagaagttggccatgtttagattgtgaaacagatgaaaaccacagggtttcggtaggagctcccacccatgcctttagagacacatgtattatccacctagttctacaaaaaagtcattattaacaccacttaaatgcatgggaagctaagcatcatgaaagcagggtggaggcctggtccctctcctgttccccggagcccatgctggaaatatctaaagtagaaagacatagaaatagtagaccctgactgccactttgataagtgcagaaaggaagtactccaaggaactatggaaacgtgaaggaggcttggcagtttaactgataagacaggaaagactttccagggtaaataaggcttatgtggaggcttgaaggattttgatgtcttggacgagagtccaggcaaagggagataggaaataccaggagacttaagagagcacagcatgtgctccagaaaggcaagaaggtatactaaaagcaaggtcagaaaggacttgccctcctttgcatatgaaagattcctttgtaattttgcctctcttttccacattttcagttactttggttaaacaagaatgcagaatatattaaaatgtcaatattaagagaaaagacatctacagaataaatttttaaaaatcataccatgtgggggacaggcacggtggctcacgcctgtagtcccagcactttggaagactgaggtgggcggatcacttgaggtcagaagttcaagaccagcctggccaacagggtgaaacactgtctgtactaaaaatgcaaaaaatgagctaggtgttgtggcatgtgcctgtaatcccagctactcaggagactgaggcaggagaatcgctggatcccgggaggcggaggtcgcagtgagccgagaccgcaccactgcactccagcctggtgacagaacgagactccatctcaaaacaaacaaacaaacaaaaaaccacacacacacacacacaaaaccatgtggaaaaactccctttagactttctttcttttttttttttttaaataaaacaatcctaggctctcaaagccaaaacaaagaatagagatactctagttaaactcaccttaataaacatgaagaaacagaagctgaagagtttaaataacttgctaagtcgtctccttgctagtttgctggagggactaagtagcaatcacttaaaaatagaattttgaataaaaatatttgaaggataaccttatttgacatttagtttatacataccatgttttttaaaagctggcatttttttctgtacacaagtcaaaaagttatttattttagtcacttaattttaaaaaatcggcagtttaacatctctttttattaggagttatttttgtggtggtaacatttttagatttcctatacctcttatttcctgcatttaaatgcagttcatttacctgtcttctttgcctcaatgagatttcagccttctagaacttctcatagattgaggttttccaatatgctttaaatgttctcttatatccaaacttaagaacttgggtatcaggaactgagcgggttgactttattgctgatttaagcttgagagaattttttaaactacggagttaataggatttaactagaaacttgggttagagctctcatcaatcttctaaattcctttgaaaataagccaccataaattcaccttaagttaatgaaaaattgctaatccctttaggttcttaaaaaacttattaaaaaataactcaccctgcttgagatgttttattaatggccttatctgggagaaaataatagtagtcaaattattaactcctgctaacttattaacttttattaatgagtttaatactctcctgctttattgcaaagttagggacaaatattgaaagtcaatgccagaattattgggccaactcttatccaagtcttacatcatttctgtttttcagaaattggaattttttaaatctgtttgttatttcaagaaaagagtaaaggaagctggatgagtttacctgtgctctttttaagtgacccattgtctgtatgacgtaatggatcttcatacatggatcctgcttgactttcagggacttgcttttgaagctctaaaagttttctttcacagcagtcctaagttaaaagaaagcataacaacaaatgaaagggcttgtcatgcacgcagtaatggtgtcagccgaaccttaaatatctagaaaatggaccaacatattctaaacactgtagttactatattcacatcaaaacagcttctttttttactcctatataattgccacatagtttaaaccacgacttctgttgaatttcaactgtgtttactctagcgaaagtgacagctaaacatcttattgctttaaaacaaatggaatacgtgtattttttccccccagatttgtctatattggcacgtagccctaggattattggctgctgccaacaggcaaaacagtaatgcatgatttaaaatttttcaggttatttatagaaaagatggtaccgaaaatgacatgttttctgtagaattaatcttttgctttattagtaggaaatcatttaaattttatttttaaactaaagattactgggactagtttatttatattttggacttaggagaaactgttgacattcattacggtctttagtctgttactccagtgcatcttaatttagtttaagtgattagggagaaaaaattaaaaaatattaaatgttcagcttttaatttgtataagtaatgtgattcatttcaatattactggatttcttatttttctcaaaaagtaatttatataatttcctcaaataatatgtataggaagaaagattattctataacattatacttagtgcttgttttgtgttatatacagagtatgtataattgatgacaatcatgaaaattaaaattggctggagctcttggtgttgagatttgaatttaaattaaattggggggggtcttgaaaaaaacattagagtagaaaactgtatttatgtctccatccctcacagaacccatttctggggtacaatgaatcattgactctttaaagcaccactgccatggctggattttacagagaaaaaataggcagttagcaatttctgctattttttaaaattatttttacattagaaaatagatttcattttaaactgcaacagtttagaaaatggcatgtagtcatttaaataaataagtagatccagaatatagcataaagtccctaacttaaaccaagatattatgttttatgtttctcaaataaaaagtttgagtttatggcaatttattataacaatgtttttgaaggacttcattgactaaactccatgctaagagtttgccagaaatgctgccttctgtagcaagtaaactttaaggatttaataacattttctagttacagtgggtttctaatcttcataggaacaagttttattttaacaggggctaaaacaggtatctggtgataacagattagcactgaatgtgtttaatcattgagcccagagcactttatctttttttttttttagtgttagctgttagcaagtattgtttactaaaggtttgcacacactcttgcctaattctaaatgtttttagaaacaaattaagatgaaactttaagatttgttagagaaagaataagaaacagcaataaactttattctccttaaaatgtaagatcctgctatgattcttcactggggggaaagaagatacatttagaaaattggttatctcagattcttagtatggttttagttagttagttttaccacttggtagagttaatgatttgacaaatgacatttgcttcttattatcagccagttggttgctagctttaaagagttattataaaggatttttttcagtattaatttatttcataaacatatatttaatttttatatattattatgaaaaaagggaattatttcattcttttttaaaaaagtctagaattagaggctaatatttccttatagaattgtcaggaaacaaactgttgtaataagttgtttttgtgttccaagagatgtgactttgtcagaatacatccaaattcatatttcttagcagatctttaacataacaccatttataattctttctgttttcattcttccttttttctcctggcctattgtaaagcagatctggcagccagaggttgtatcaggaaccacagaaagaccccactgcttaaatatcttcaaagcagtctttcactttgaatagatgaatggatattgctaccatgtaaggatatttaggtgaagctcatgaacaaatcttgttgtacagaagttatccctttgttctgcaatgccaaagtaaatttgggctcattattttatggaattataaagtaaagctaataaaatacacttatagcaacaaatgtttaattcccagtactagaaaaataaaatttaaattgtagaactaaactacttttaaaagcttttgaatatattggttaaatcccattaatacatacaaagttaggcacagagtttcttggtggatggaagaaagactgatttcacactattttaatcctctgtcaagacgcaacttattaattatatacagatagtttgtagccgatggatgtgatttttgttactgattttgcttaatgcagttacattaatgccagaatagtagaatcgtggaatagttatcaagttagaattttaagttcttggagataatagagcacattacactgcatatagaagatgatccataaattattagtgaaatagtaaatgatttagtgtgtccacagatgagtaaattaaggtcaaagaggtttaataaaaattttcggccgggcacggtggctcatgcctgtaatcccggcactttaggaggccgaggtggatggattactcaagctcaggagttccagaccagcctgggaaacaaggcaagactctgcctctactaaaaatacaaaaattaactggacatggtggtgcacacctgtaatcccagctactcgggaggctgaggcacgagaatcgcttgaactctgcttgaggcggaagttgcagtgagccgagatcgcaccaccgcactccagcctgggcaacagagcaaagctctgtttcaaaataataataataataataaataaataaataaataaataaataataaaaaaaattaagggaacaaagctagccagcagcagtgagagtctaaattctaaagaatttgggaagcctatataaggataattggattttgcaatgttaagatcaatggaatactgatttcacaaattcgggtgtctaagaactggtatcagaggttagcaaagcaggctgtatggcagcaatcgggccttggtggaagagagggtctcacgtttgcaagtgtgtgtagcagaccaatttattggccagtagctgcatgggcacttcctaaatgtttcacagattattagtttcacttagaattttctctctctggacctgaatctatgactctaaaacaaacccagaaaaaggaatcagtatgctcagaaagaaagatgtgaaaaacatccattctccagacaacgcatgtgaggaataaaaacaggtaaagtgattttgttcagcaccgtagactaaacttgactctggattgaattttcagagtaaaatgtgattaaaggcaaacatttagtactgtaaaacagaattaagattgtaatatttaggcatgtgtttcatgtgtgtgtatgtatgtgtgtatacctatgtatatatgtgtatgcagatacatacatatatgttacatatatatatatgttttaattttagtgctcaagggaggacccctggatggcacttacagattgattcagtttcactttcactggggttcacttgatggacaaggttcagagcatactgtggataaaaagaaatatgctgcagaagtaagatatacttttttttttctttccagggaaaaatgtttataagttgatatttagcattaatttcaaaagcttaatttgtaaattcaactcacgcccagtgaaccacttcttttacaaaggaccttcacatttgctttttataacctttaattgtgacatcatacttaacgctgcaaaactttctctactgtctccaactccaccatttgcaaaaagtaaacggactcaaactggaggatcctgttttaacagaaatttagaaataaaatgtgtgccttctgtcaaaactgtacatttatttgtcttagagttattgatgaaaacacttgctgttataccaagtactgtgtggatgattagaattaaaatgaaaggaaaattttgatttaaaattatccatattttcaatttcctgagtaacctttattgtgagaaaaagaccattgaataaaatctgtcagctttgattatgtaaatcactcactgtggctttgtctcttcggccttagcttcacttggttcactggaacaccaaatatggggattttgggaaagctgtgcagcaacctgatggactggccgttctaggtatttttttgaaggttagttgatgacccaattcttttttttccctatttttaataaagaatgaccagacagagtatttgtaacatacaggacattctacaaaagagcttaggaaatgcctttgtccctgaaatgttttcaagtttatctcctcctttcatatctgctagttgcagtggagatggagggcagaaagacaataggagaggtacttatttggtaccttttggatgtaaatgtgaagaacataaagagatcaacttgggtgactgctaggtgtttgtttgttttcttttcatttaacctgaggctagacagtactatattatgataaagtaagatcaggttctgaagaggggaaggacagtgaatttcaggcaacagtgggacagaaccggttgagctgccctctaaacagtggtaaaggggaatggagaaaggtctgggctggagatttatgagctctgattcatatgttgaggtggaagctacaggtgtgtatgaaatcatccaagtacagcacgaagagggagatgagaaatctgcccagggagcaatcctgagaaactgcaaaatgtaaggcctttacaaggggagagatgcaaattaaacaacttaaaaggggccaggtgtggtggcttaagcctgtaatcccagcaccttgggacaccaaggcaggaggatagtttgaggccaggagctcaagaccagcctgggcaacatagcacaattccatctctacaaaatttttttaaaaattagctgggcataaaaaacaaactaacaaacaaaaaaacaaaacaaaaacaaaaacacaaaattagctgggcatggtggtatacacctgtagtttcagctacttgggaagccagggcaggaaaatcactgcagcctaggggttgaggttgcagtgagctatgatcatgccactgcactacaagctggatgacagagcaagactctgactctaaaaaaaaaaaaaaaaaaaaaaaaagcgagagtcaagagagatttgggttgctggaaggcgtagggaaagccaaagaagaaaataatttttaaaaagaagggaagaccatagtgtaaagtcctacaaggaaatcaaggcaagcccttgaggagtatcctttggcagttagaggtcactggggacaattgagctggtggtttcaggactactctctgagtggaattagaggcgagttgaagattcagtgaaagtaggcaagtctatggtgtcagtgtcatcaagccagtactgatgggggtcatgtatgaagtggagaatttgggctcactatttggatgttttctaatagagctacccaaataaaaataaaaactggtacagtaccaactgggtgatagtatcttgccctttatgtttttctttaggttggcagcgctaaaccgggccttcagaaagttgttgatgtgctggattccattaaaacaaaggtaaatttgaattttctgccacctccttagggtaccaattttcaatactccattggttttagaaatttcttttgatcaaattgcacagtctcaatgacatgtggtgtttggatgagcagttagtaaaggtagaatattacttaaatatttaattaacgtttctttcaacaaagttgatcctaatgctagcataattctaagacttgtatttatttaatcttgctcccccatcatttggacatccatatgtaagagtcagagaatcttatgcctgcaaggaggttcaaaggtcctctagtcaaattattcactcattcatacagcagatatttgttaagtatgtactatgtgccagtcgctttgcaaactagtagacacaatggtgaacaagataaacaaggccctgtttcatggagatttctattctatgacctctttgcattcatccatcctgcatttaaatcctctctgcagcatagttgtgttgaggtcgttgagcatctgtttaaacactacagtcacttccggtgatggggaacttatcaccaggggcagccctggctttataaagctgatcttcacattgaagcagcatctatcctctgaaatgctcactcactggcttgagccccttgaattcatagaataaacctgatctctcttccaaataactctactctgtctctactttgttttttcacctaccccaaactaattatctttagtttcctttaactattctcatatgatatagttttctctctttgccaccaccttgtcattcttccagtaaatcattcctgtttgcttgaaaagtgtagtgtccaaaacagaatgtagttatttgattctgacctagagcaagaaaatcacctcctcatcaggataccatatttctgttattgcaacttgaagtcacctcattttagtggcagcagtctcactttaaatactgggtgtgatcagctaatgacttaatggggaatgtaagggatcattttagataaaaggccaagatgaaaaatggacatgtgaaaatagtttttttttttttttactacgacttgccacatattttcaagttgaatgtcttctgttaatttctctttattttgtttgccagtgaatatagaacctcttttttaaaaagtgtttttgaccatcagaggggagtatacctatttgtgtctgctgctctcctaccttcctcctactctgtcaatgtgatagtttgaagctgcgtatttgccttgttctagggcaagagtgctgacttcactaacttcgatcctcgtggcctccttcctgaatccttggattactggacctacccaggctcactgaccacccctcctcttctggaatgtgtgacctggattgtgctcaaggaacccatcagcgtcagcagcgagcaggtttgttttgtaatgacaggtctgtttacgggtggagcatttagtcaaggcagaagaccttggcctccagagtgagagagaactgagatttaatccttctcctgctacttcttgctatggaaatagtgcctttgatggtgcctagcaaataaacagcgttcagtaaatctttgttgttattaactataaacttagttcgtttagtctctaaaattgaatagtcattgtaaggattcaatgagaaagatgtctgtcacctaataaatgcctttttttttttttgccagttatgaggaaactaaggcttagaaaagtgagagttcatattcaaggttacgcaggtatcagtgagttaccagcctactactcactcacataagggctttctgctattttatttatatcagaatgcatttctgaatcctgacagatgagagtcatcccttggagaacatgtatctattaaaactcactccaggttgctttagaggcttagagcaggtattcttacatttccaataaaatatagtgtgtgatcgtcaagtgattagtgcagcttctaagtcactgatgagcagccactaaagtggatacaaatgagtttttcctagacttacctcttagcgcacagttgaaatgtagaaagtgaacattccttaggattcacaagaggatggatcctgaataatttaaggatagctttaggagccaacagtcttgaaaatggtaactatgtgagtagtggtagtgtgatttaaacctacaaaaatgctgaataatagaggtttagagctgcaatgtgcaatagagatcatgttgtccaactttctcatttcactggcttgaatcacattgatcaacagtctgagatgcaggaaaattgaagtgttttccactcagctaccttgcaacagaatcaggcctgggagcaaggattctattcctgtgtcctcccttagaatatgaacttatgaatgctgaagatacttcatatctttctttaaaggaaatatgtatctgactggaaaattacttgtagcatatcaaagtgggcctaaaaaatagcatgcttggtatgtcacttgaagattgaccttgtagtaataacatatttgagtaagcttcttgaagtgtagcgtaaggaaagattataatgcccttctttttgtagatgcagtgtttacattataatttaaaacatgaatttttttttcttctttcactgagagcaatgcaactttaaagcaatagtctgacatttagagccattataacaaatggatttatggtgtatacacacccacaggcagaaatacacatatagataagggcagttgaacctactgcattaatccctgtaccctgagtttgctctttaaagttgaaagtggtattaaactaatgatgttaattgtatatattggcaaaataccaatagggctcttttttttgtcctataacatggaatctggaggaaggatcatgctcagctcaggaagctagggctgcaggtcctcctctatctgagtcccttgacttggccttgccaattggtgacttcatcctcaaggtggttgtaatagcattttgagcatcacatctagatataaccacttcttgaggaggaaatgaatacctcttccattggcttcctaagagcagagaagctctttcctgaaggcccctagaaaacctttcacttctcactggctagaattgtgtttcttgctcagtccctagcccgggaatgtgatcatcacagtcagttaagacctgcaggtttaccccactgaggcttacagggagagggcggatgtctgttaatgaggaagtatgggggggcgtggattttaggtaagcagtataaatgggtctgctaattctgctacctttattttctatacccaggctctgtctctgtgatgctaaaacaatgagtcaagttgactaatgtgacagtgtagtttaattggtgcagtgagtagcagaaatcggttatactggtttgatcaaaagtttgacctgtttacactttatgaacagactctctttcagattgctggaattctgttgtaacgaatcaaccctatatatccttagaatgctcccttgcattcagtaaccatagctgtgcatgttataatgtatgtgcatggaaggtggctctacgggggtgattgagggactattactggacaaaagagatcaggttaaaggctgttgattcatgggctgctatattactgtccaaaccacccttttgcatttggatcacgtcttggttagaggggggaaagtagcactttttgagaaccttgaagaagtgggagactgttcaacagctgcctgtatctcagtggtggccagtaaactgaaacaagtttataagggaataaaaatcaaccagtgacaaggggttctaatgttaaatgcatatattggcaaaatgccagtagggctatgtagggtggtgagcactcacaattgttcactaaaatgctgtttttaaaacaggaaagtagaatggttgagtgcaaatccatagcatgagataaattgagcttcttaaggcaaatcagcctaggcaaattcatttccgtgtttttgtgtatttggagatgccagctcgtcactcagcccatggagcttacaggtcctgatcacttgatctaattgtatggatgtggtagtttgtcttccctggggcagaaaacaaagctttaatttggaactaaaattgttattattttgcatctaaaggtatgagtttatagacttttgatgttagatttttaaattagaaggtcactgaaaatttcccttaaaaatgaccccaacgaatttgtgtattttgtataaattggtttgttatattaaagcatacatacataatctatatgtgattatgtattcattaggaatcaaactgaattttggccattgatgcacagcactgaatgttgtggaatgtaatttttgtttgtttttgtttctgttttttgaggcagagccttgctctgtcgcctaggctggagtgcagtggcgcaatctcagctcattgcaatctctgcctccagggtttaaatgattcttgtgccttagcctcctgagtagctgagattacaggtgctctaccacgcctgtttaatttttgtgtgtgtgtgtgtgtgtttttttttttgtagagacagggtttcaccatgttggccaggctggtctcgaattgctgacctcaagtgatccacccgcctcatgcctcagccttacaaagtgctgggattacaggcatgagccactgcgcctggccggggaatgtatttaaagatataacacaagtatataactgaataccattgtgaaacattaattatcaatgttttattgtgtcttttaggtgttgaaattccgtaaacttaacttcaatggggagggtgaacccgaagaactgatggtggacaactggcgcccagctcagccactgaagaacaggcaaatcaaagcttccttcaaataagatggtcccatagtctgtatccaaataatgaatcttcgggtgtttccctttagctaagcacagatctaccttggtgatttggaccctggttgctttgtgtctagttttctagacccttcatctcttacttgatagacttactaataaaatgtgaagactagaccaattgtcatgcttgacacaactgctgtggctggttggtgctttgtttatggtagtagtttttctgtaacacagaatataggataagaaataagaataaagtaccttgactttgttcacagcatgtagggtgatgagcactcacaattgttgactaaaatgctgcttttaaaacataggaaagtagaatggttgagtgcaaatccatagcacaagataaattgagctagttaaggcaaatcaggtaaaatagtcatgattctatgtaatgtaaaccagaaaaaataaatgttcatgatttcaagatgttatattaaagaaaaactttaaaaattattatatatttatagcaaagttatcttaaatatgaattctgttgtaatttaatgacttttgaattacagagatataaatgaagtattatctgtaaaaattgttataattagagttgtgatacagagtatatttccattcagacaatatatcataacttaataaatattgtattttagatatattctctaataaaattcagaattct

SEQ ID NO: 110 - DNA, 87563 bp, Homo sapiens
agagaggctggttttggtgttcccattttgcagatgagaaaccgcagacgccccactgggctgcggtggaggtcttgtgtcccactccatagcctcagactcctgcccatcccagacacctgcccctagtggtgtctggaagcaggatgtgggtggctagggactccccagcctgtggggactgagaaggaaccaggacccggatatgggtccctcactgttgttcctggcaggagccaaaggaaggaacctagccactaagccagcaaatatgaccacatgccacctcccaccctcactgcccacacccccaccctaccccacctccacccagggacccaggtgctcatctgcctgctccccagctgtctccctcagggaccccacccttccaggaccaaactctccagaaggcttccagggaatggccaccagctgtcctcactcccttcttggaacccaggcatccagaatcactgtccctccttcccaggccttcacagtttcccatttcatctggccatgaggatggcagcctcctccaggaagttggcatcatctgcctggcacgtggcccagggtgtggcccagaaactccactatatagccctgccacagggctggccctgcagctccagggacctgcaggtgagaagggctggggtcccctttggaagtgggacagcaggtcccctactcttgcccctgactgtaggcctcctcatcctacccctagacccacaagacagccaactctccaccccgtccctggcttctgccctccccaacccacctccagacccgctggacagccagcctcccctatacacacacactggtccttggatccataccccctggcccaatctgcccgacttctttccccacctcagccttcatggtcccaggtggcccttgtcatgagagtgggcccttctgcccaggacagtctccagcagaggcggtggatcagccttctatgatcctttctcttttcctactgcagccatgggtgccctatggagctggtggatactctgggctggagcaaccctcctgtggggtaagtcagaccaagaccctctccatgtccttgttccaatctggggaactctgcgtgggtccacgccttccatgtgtgcctcctccacatgtcaccccaggctagctgagacaggagagaggcccttaggctctgcagggggatgtggtagaattcaccaattctcacccttttctggatgggagcacaggcaaaaaccttagtccccaaactcaagtgtgcaagaactttcttggttttctgcaactcaactaaggttttgactctgagcctcattctgctaagttgatggaaaatttcacgaaagtcattcttggagggtgttgtccccacttctcccagggatgtgtccagaactaaaattttggataaagccaaagtactggggggaggatgggatatgaggaccctctcgtcaccagtcagcatccatctaggttacttttgaaatgtccattgttcctgatcccctggccccctgggatatccttcaaagccccctttatatggaaggtggtcattccatagcccccacactctcttcaagattccttagacctctctctcctcagccccagggacgctcttcctagttgggggtggtcagaagcccccactgccatctatttctaggagacaattcattcacccttccataatccccttcttctctttatccccttttcacaaacccccaagtcccattattattattattattattattattattattattatttgagatggagtttcactcttgttgcctagactggagtgcaatggtgtgatctcagctaattgcaacctccacctcctgggttcaagcgattctcctgcctcagcctccctagtagctgggattacaggcgccccatgccaccatgtccggctaattttgcatttttagtagagatggaatttcaccacgttggtcagtctgctcatgaactcccgacctcaagtgatccacccgcgttggcttcccaaagtgctgggattacaggcaagagccaccgcgcctggcccccacaagtcctattaagacaaaaaccagctgggtacagttggtcacgtctgtaatcccagcacttcgggaggctgatgcaggaggatcacttgagcccaggagttcaagaccagcttgggcaacaaagtgagaccctgcctctagaaaaaaattaaaaaatgagccaggcacacagtgcgtgcctgtggtcccagctataccagaagctgagacaggaggatcccttgagcccaggaggttgaggctgcagtgtgttgtgtttaagccactgcactccagtttgtaaaaagatggaaatcatacactggcagcagagtacatccaccttgagccccaaagtgcttaaaacaattgtgggttggagatttcacatgaaaattcagatagccacattctctttaaaaacagaaagaacggccaggcgtggtggcttacgcctgtaatcccagcactttgggagaccgaggcaggtggatcacctgaggtcaggaatttgagaccagcctggccaacagggtgaaaccccatctctactaaaaatacagaaattagctgggcgtggaaaccgggaggcagaggttgcagtgacccaggatcgcgccactgcactccagcctgggtaacagagtgagactccatttcaaaagaaaaaaaagaaaaaatacaaaagttaactgtgcctggtggcgcacacctgtagtcccagtactcgggaggctgaggtggtagaatcactcgaacctgagaggcagaggttgtggtgagccgagatcgtgccactgcactccagcctgggtgacagagcgagactccatctcagaagaaaaaaaaaaagaaaaacaggaaggtcttacaatttaaaaaagctcacattctttcattataacaggtgaaagctagtaccaacaatccactttttttttttttactagtttatatatttttaaaatttttaatttttatgggtttgcatttatggggtacctgtgatattttgatacaggcatacagtgtgtaatgataaaatcagggtaactagggcatccctcacttcaagcatttgtcatttctttgtgttaggaacattccaattccactctcagttattttaaaatataccataaattatcgtcaacaatagtcatcctgttctgctaccaaatactagattttatctattttatctaactgtttaactgtatttttgtacccattaaccatatctacttatcccccagtccccgctacactttccagcctgtggtaatcatcgtaaccatcattttactctctatttctatgagttcatcagttaaaaattttaaattcccatctatgagtgagaacatgtgaaatttgtctttctatactggcttatttcacttaacatcatgtcctccagttccatccatgttgttgcaaatgacaggatctcattccttttttttttttttttttgagaccgagtctcactctgttgcccaggctggagtacagtggcgcgatcttggctcactgcaacctccgcctcccaggttcaagtgattctcgtgcctcagcctcccgagtagctgggattacaggtacatgccaccattcctggctaatttttgtagttttggtagagacagggtttcaccatgttggccaggctcgtcttgaactcctgacctcaagtgatccacctgccttggcctcccaaagtgctgggattataggtgtgagccactgtgccgggtgatctcattcttttttatggtggataattctccattgtttgtatgtaccaaatttcctttatccactcatctgttgatggacacttaggttgattccgtatcttggctattaggaatagtgctgcaataaacatgggagagcagatgtctcttacatatactgacttcctgacttggaaggaaaggaattgctggatcatacagtagttctagttttagttttctgagaaaccttcatattattatcgatagtgattgtactgatttacattcccaccaacagggtaacagggttcccttttctccacatgctcagcagcattcattactgcctttcattaggataaaagccattttaactcgagtgagatgatatctcactgtggttttaatttgtgtttctctgatgattagtgatgttgagcattttttgatatacctgctggccatgtgtatgtcttctttgagaaatgtctattcagatcttttgcccattttaaaatcagattaatccgggcgtggtggctcacgtctctaatcccagcactttgggaggccgaggcaggcggatcacttgaggtcaggagttcgagaccaacctggccagcatggggaaaccctgtctctactaaaagtacaaaaattagccgagcatggtggcgcatgcctgtaatcccagctacttggaaggctgaggcaagagaatcacttgaacccaggaggcggaggttgcagttagctgagatcgtgccactgcagtccggcctggggtgacagagtaagaccccatctcaaacacacacacatacacacacacacacacacacacacacacacaaatcagattatttgatttttttcctattgagttgtttgagctccttttatattctggttattaatcccttgtcagtaccatctagaaatgctactgatttttgtatgttgattttgtatcctgcaaatttagtgaatttgtttatcagttctaatagctttttgatggcgtctttaggttttttttaaatatcagattatatcatctgcaaacaaggataatttgacttcttttttttttttttccagtttggatgcctttatttctttctcttgtctaattgctttagctaagatgggttgtatatattttctcttattctgtcagttgtgtcttcactttgtggattgtttcctttgctgagcagaagctttttaggttgatgtgatcccatttgtccatttttctttggttgcctgtgcttttgatgtattacttaataaatttttgcccagactaatgaactggagagtttcccaaatgtcttcttgtagtagtttcgtagtctgaggtcttagatttaagtctttaatccattctgatttgatttttgtatgtggtgagagataggggtctagtttcactctttgcatatggatatccagttttcccagtaccatttatcttcaataaatgcaatgtatgttcttgggatctttgtcaaaaatgaattcactgtaggtgggtggatttgtttctgggttctatgttctgttccactggtccatgtgtttgtttttatgccagtaccacactgttttggttattatagttttgtagtataatgtgaagtcaggtaatgtgattcctccagttttgttctttatgctcaggatggcgttagctattctgggtattttgtgtttccacacaaattttgggattagtcttctatttctgtgaagaatgtcactggtatttttatagagattgcattgaatcggtagattgctttggttagtatggacattttaacaatattgtgtcttccaatccatgaacatggaatatctttccattttttttggtgtgtgtcctcctccatttctttcattactgttttatagttttcattgtagagatctttcatttctttcgtttattcctaggtgttttattttatttgtggctattgtaaatgggattactttcctttttttttttcagattgtttgctgtaagcatatagaaatgctactgatttttgtatgttgattttgtatcctgcaagtttagtgaatttgtttatcagttctaatagcttcttgatgaagtctttaggttttctgttttttttgttttgttttttgttttttgttttttgagatggagttttgctctcgttgcccaggctggagtgcaatggtgccatctcagctcggtgccatctcagctcactaccatctctgcctcccaggttcaagcgattctcctgcctcaacctcccgagtagctgggattacaggtgtctgccaccatgccaggctaattatttttttgtatttttaatagagacaggttttaccacgttggtcaggatggtctcaatctcttgacctcttcatctgtgcagctcagcctcccaaagtggtgggattacaggcttgagccactgcacccagccaaagttgtttttttttttgagacagagtcttgctctgtcatccaggctggagtgtggtggtgtgatcttggctcactgcaacctccacctcctgggttcaagagattctcttgccccagcctcccgagtagctgggactacaggcatgtgcaactatacccagctaatgtttggtttttttttagtagagattgggtttcgccatgttggccaggctggtcttgaactcctgacctcaggtgatccacccacctcggcctcctaaagtgctgggattataggcgtgagctaccaagcccagctgtcttcaggtttttctaaatataagattatatcatctgcaaacaaagataatttgaatgccctttttccagtttggatgccctttatttttttctattgtctaagtggtttagctaggactaacaataatatgttgaagaatagtggtgaaagtggacatccttgctgtgttccagatcttagagcaaaggctttcagtttttccccattcagtatgataccagctgtgggtctgttgtacatggatttcatcatgttggggtgtgttccttccgtgtctactttcttgagagtttttatcacgaaaggatgttaaattttatcaaatgcttttctggcatcaattgaagtgatcacatagtttttgtcctttattctgttgataagatgtatcacactgatggatttgcataagcaacaacccactttagatggtataggagtgcttcagttccacagtcgcccctccgggactgtttcacacatttatatttcttgcctggccccatcagcattggagtttgagggccctgtctaaggtgtttagatttttgaaaaacaaaagccaggaaggcttgtagacgaaagctgcatgaatcagaagaaaggaaagagaagggtggtgggggaaagcccaagttaatacttcaacatgtttctgggtgcagagcaaaagtggggaggattggataagtggacccacaactgtattttctcaaccaggattgacccaggaggcttcagtggacctcaagaacactggcagagaggaattcctcacagccttcctgcagaactatcagctggcctacagcaaggcctacccccgcctccttatctccagtctgtcagagagccccgcttcagtctccatcctcagccaggcagacaacacctcaaagaaggtcacagtgaggcccggggagtcggtcatggtcaacatcagtgccaaggctgagatgataggcagcaagatcttccagcatgcggtggtgatccattctgactatgccatctctgtgcaggcactaaatgccaagcctgacacagcggagctgacactgctgcggcccatccaggccctaggcaccgagtattttgtgctcacaccccccggcacctcagccaggaatgtcaaggagtttgccgtggtggccggtgccgcaggtgcctcggtcagtgtcacgctgaaggggtcagtgacattcaatggcaagttctatccagcaggcgatgtcctaagagtgactctacagccctacaatgtggcccagctacagagctcagtggatctctcggggtcaaaggtcacagctagtagccccgtggctgtcctctctggccacagctgtgcgcagaaacatacgacctgcaaccatgtggttgagcagctgctacccacgtctgcctggggcacccactatgtagtacccacgctggcctcccaatctcgctatgatttggccttcgttgtggccagccaggccacaaagctgacctacaaccatgggggtatcactggctcccgtgggctccaggcaggtgatgtggtagagtttgaggtccggccatcctggccactctacctgtctgcaaatgtgggcatccaggtcctgttgtttggcacaggtgccataaggaatgaagtgacttatgacccctacctggtcctgatcccagatgtggcggcctactgcccagcctatgtggtcaagagtgtaccaggctgtgagggcgtggccctggtagtggcacagacgaaggctatcagcgggctgaccatagatgggcatgcagtgggggccaagctcacctgggaggctgtgccaggcagtgagttctcgtatgctgaagtggagctcggcacagctgacatgatccacacggccgaggccaccaccaacttgggactgctcaccttcgggctggccaaggctataggctacgcaacagctgctgattgcggccggagtaagtaatggaaatgtcccctggtcctgtccacctggtgaccgcttttccacccacctactcctctgtggctttcgggatcctgattgtcctcccctcacttctcttctccgcgacatccttcctcaagtcttctcagcccctcccatccgcccagaaacaatattctaaatatttagcaaccagggagagctggggcactaccagtcagaagagacagcagccaaagcactgtgacagggtcctgaagcccccatcatgctggcatcagcccctgtctgttggtttgttctggaaagggccctaggggagagccagggtgctgagaaggagggatctttggggttgtgggggacagtcaggtcagcagcttctcaccaaccagtttggaaatattttgatattttagcaactgacatagccacaccagttgctaagccactctccacacctcatgtaggaatgttgatacccaaacttaggagatctaaatgtatgataataagatgactacgcgttggggaggggagtatcttgcaatctttctaggtgtttcacgtgtttttgacacagttaatgtatatgacctggcagtttgtgtgacctcaggctcagcccatgagacgctgtcagtgtagtgcagggtcccagggttcaaatcccagctctgctgtgtgatcttggacaagtgacttcatctctctgggcttcagtttccacatctgtaaaatggggataactgtttctccctcaaaactttgttttagagacagggtgtcactctgtcactcgggctggagtgcggtggtgtgatcacagctcaccgtagcctcgaactcttggactaaagcaatcctccctcagcctcccaagtagctgagactataggcatgcaccaccacacccagctaatttttaatttatattttgtagagatagggtctttccatgttgcccaggctggtctcaaattcctgggctcaagcgatcctcctgcctcagcctctcaaagggctggaattacaggcctgagccaccacacccagctgcaaaaacttttgaggactgggaggcagatggaggaaagctgtttcttcccatgtagtccctgccacgctaagactctggcattcctggacctggcaaaaatgcccctcccctcccctccaaggcatggaagccacccaacttcaaggagccactttgggcttgagaaatagaatgagggagcggtgggtgattaattataatgggtaacactccacttaacacgtaggttcagttctaaagctttctcgagttttagcttatttaatcctaacaccccccaccaagatccctacgaaggaggtattattatcacccccatgttacaaatgaggaaactgaggcagagggagtttaaaaccacttgcccagtgtctcagagccagttggttgagccaggattcctacctaggcggcctgactccatagtccttttcatcctgctgaaggctgtcttccattttctgtccttaaaaaaatcccttagctctttttgaccctggagggaaggtagggaagaggggaaaagggggagagaaaaacacaaattaacattttaatgaccgtttctgccttttcttatttactgccttcccttcttctaggctgccctgtgttaaactggagaatcagaaaacatggggctctcagagaggcctgagcaactctctccctgtggggttccagacctcggtttccccacctttaaaatgggcaaaaatgggcaaaaatgggcagttgtgagcgaattgctcaagcttccccggcaaggtgggctccaggatgcctccctctgaggcctgaggcggtttcttccttcttccttcttcttccctcctcctcctcctcctcttcctcctcctcccccttccctcttcttcttcttcttcttcttcttcttcttcttcttcttctttcttctttcttcttcttcttcctcttctttcttctttttttctttgtgagacagagtctcactttgtcacccaggctggagtgcagtggtgccatctcagctcactgcaaccttcgcctcctggggtcaagagactctcctgcctcagcctcccaagtagctgggattacaggcatgtgccaccatgctctgctaatttttgtgtttttaatggagatggggtttcactatgttgggcaggctggtctcgaactcctgacctcaagtgatccgcccccctcaccttggcctcccaatgtgctgggattacaaccccgcggacacttctgattctctcttttcaccgttcccttccctccccagctgtactgtccccagtggagccctcctgcgaaggcatgcagtgcgcagccgggcagcgctgccaggtggtaggcgggaaggccgggtgtgtggcggagtccaccgctgtctgccgcgcccagggcgacccccattacaccaccttcgacggccgtcgctacgacatgatgggcacctgttcgtacacgatggtggagctgtgcagcgaggacgacaccctgcccgccttcagcgtggaggccaagaacgagcaccggggcagccgccgcgtctcctacgtgggcctcgtcactgtgcgcgcctacagccactctgtgtcgctgacccgcggtgaagttggcttcgtcctggtgagtacctgggggctttggggggttaacatccatgagctgcgggtccgaaggcggaggcaaagcccaatggccgacctcaaaccagggtgcagggaagtgggccatggagttggagggtggggaggcggatttgaaaatcagtagcaggaccttagaaccctgccctccagccatcccacgtctagaaatttaaaggatattcagagacagagactggggggtaacatgccaacatggtttataatagcataaaacaaaaacaaacaaacaaaaaattatccagcaatgggggatttacgttgaccaaataactaaatttaatgagcacctgctatgcaccagatatgtttcttagcacttttctcatcttaacgaatttaatgctcacaaactcagtgcaggaggcattattattatgaacatgttcagattgggaaactgaggttgagataggctagtgacttccccagggctcagagctagtaagaggtggagctaagggcacaggcatgctggctctggagtccttgttcttaatccctcagctgtcctgactctggtaaatgcatttctattcagttcatatgaataacagcagcctagagcaattacttcctttttctcgccatgttattatgaaaatattaaaatgtccaaagttgaaattcttatacagtgaatgctcatatgccaatcgcctagagttttctttctttctttctttcttttttttttttttttttgagatagagtcttgctgtgtcacccaggatggagtgcagcggcaggatcaggttcaagcgattctcctgcctcagcctcccgagtagctgggatgacaggcatgtgccgccatgcccagctaatttttgtatttttgtagagaggggtttcaccatgttggccaggctggtctggaactcctggcctcaactgatcggcctgcctcagcctcccaaagtgctgagattacaggtgccaatcatctagattctaaacactgtactcttcttgattgatcacacactgatccatcggttcatccctctgtccattccacaatctctcttattttttatgcacttcaaagttccagacatgagtacatatcacccaaaagacttcaccatgtcattaactagaatataatattttcacacttcttttggctgattttggaggtgaaatttatatataacaaaaatcacaaatcttaactgtatagttcacctttggcaaatgtgtaaccaaattgcccattaagatacagaatatttttatcacctgggaaaattccctcatgtgccttaccaaacagtccccaacctactcctggagatgatcacaattctgattttttttttccagcatagattagttttgcctgttcaataacttcagggccaggcgcagtggctcatgcctataatcccagcactttgggaggcctaggtgggtggatcacttgaggtcaggagttagagaccagcctggtcaacatggtgaaaccccatctttagtaagagtacaaaaattagctgggcgtggtggcgcatgcctgtaattccagctacacgggaggctgaggcaggagaatcgcttgaacctaggaggcagaggttgtagtgagccaagattgcaccactgcactccagcctgggtgacagagtaagactctgtctcaaaaaaaaaaataaataaataaaatatatatatatatagagagagagagtatatatgtgtatatatatatatatacatatatacacacacatatatacatgtatatgtgtatatatatgttgtgttctctactttgctttttgcatttagcaatacattctgaaacagtttctctatcaacagtttctctatcagcctctatttttttttaacatctgcacaattctttatatggatatgaacaccatggttcattcaaccagtcccctgtggatggacacattgttcactattacaaacaatactgcaatgaatatttttttgatttttttttttttgagacaaggtcttgccctgttgcccaggctgaagtgcagtggtgtgattatagctcacttcaacctcaaactcctgggctcaagcaatcctccagccttggccttccaagtagctgggactacagtctcatgccactatactgggctaagtatttttatttttagtagagataaggtcttgctatgttgcccaggctagtctcgaactcctggtctcaagtgatcctcccaccttggcctcccaaagttctgggattagaggcgtaagcccctgtatctgacctgaaataaatattcttgtacctccctgattttgtgagtgtgcaggtagatctctgcgattaataatcagttggtgaaaggaggtgttcttcagccctggaggggttgagcacaagttcaggcggacttcagatcccttgaaattatatacagaattttatacctctctctgaaaactactttttattttttttgagacggagtctcgctctgttgcccaggctggagtacagtgacgtgatctcggctcactgcaacctccgcctcctgggttcaaacgattctcctgcctcagcttcccgagtagctgggactacaggcacatgccaccacgcccggctaattttttgtatttttagtagagctggggtttcattgtgttagccaggatggtcttgatctcctgaccttgtgatccgcccaactcggcttcccaaagtgttgggattacaggcatgagccaccgcacccggcctttcatttttttttccgtcagatcctcacagaggtcagtgacttgacaaaggtgcagagctactgtcagaatcatagtaggatactcacaagacattgttaggagaggagttaatgaaatagtgacttcagcatggtctttttttttttaagtgtaaatatatctaaaggtaggaaaaaactcaacaggatctatacatttgtatgtgtctgcctacagggtgattttcttttctcatttttgctcctgtgcattttcagttttctgtaatgaacgaatattatttgtgtcatttaaaaatggagattggctgggcatggtagcttacgcctgtgatcccagtactttgggaggctgaagctggaagattacttgagcccagaaatttgagaccagcctgggcaacatagggagaccctatctctaccaaaaaaaaaaaaaaaaaatagctgggtgtggtggcgcctgcctatggtcccagctacttgggaggctgaggcaggaagatggcttgagcccaggaggtcgaggctgcagtgagctatgatgctgccactacactccaggctgggtgacagagcaaaactgtctcaaaaaaatacataaataaaaaaatagaaaaattaaaatggagatcactggacttaggggagaaacagatttgagcagccatgctggactgagagctctgagcatggggccatggcctgtctccatcactgcagtgtctaaagcaccagctggcacagagcaggccacacagtgggactcacagaagctttgctgggagccggaatgagtgaatgctctgtcttccttctgggccattgctcatgctgtcctctctcctgttgctccttttatcatattccatcctcttggctaagacttctccacttcaagtctcagctctggcacagctcagagaatgtgtaaggaaagagtaagaaagagatgcccaggctgggtgcggtggctcacacctataatcccagcactttgggaggccgaggtgggaggattgcttgagccatgagctccagaccagcctggacaacatagtgagacccccatatctaatttaaaaaatttttttattaattaaaaaaaaaaaaggctgggtacggtggctcatgcctgtaatcccagcactttgggaggctgagcaggggtgggcagatcacttgaggtcaggagttcaagaccagtctggccaacatggtgaaaccctatctctactaaaaatacaaaaattagctggacgtggtagcaggcacctgtaatcccaggtgggagaatcacttgaacctgggagacagaggttgcagtgaaccgagatcgtgccaatgcagcccagccttggtgacagagcaagattccatctcaaaaaaaagatgccccagggcacagagagacatagttcttatctcctggttcttagtcagacttcaggcttctccagagcctgggaggcttataaacaacacaacctcgtctctgtgttctggaggctggaagtccaagatgaggtcaccagcactgccaggttcaggtgagggtgctcttccaggttgcagatggcctacttctccttgtatcctcacacggtggaaagcggatctgagagctctctgaggcctctgtcataagggcactaatcccattcatgagggtgccaccctcatgacctaatcacctcccaaaggcctccccccactcttaataccatcatgttgggtgttaagatttcaacatccctgaccagcaaggttagatctggccatttttctaggttttcacagcctcctatctccccactatcccagctctgaaccctcagcctgtacctcccctatcccatccttgacccctctgcctgggcctttctgatcctggccttgacttttctgcctgtgcttctcccatctctgccctgacccctctgagctctcactgtctggtgatgtgtctgtttctcccaatggactgggagccccatgagggtagggcttggggctgtctccgccaccttcgtattcccaggatctcccagctcaaggccaggcacagagtgagtgcccagtgaatgtttattaaatgcagcagtgacttaattcacttagtgagtgcctgggattctaccaggccctgttctatgcactggggataaagcagtgatcaaagcagacccaaacccttgtctttgtggagctgccattctgatggagtaagacagatgataaacatggtcaatttgtgaattatatttcagaaggccagatgctatagaaaaaaaaggaaagcagggaaggaggctatggaatagggagaggctgccttttttttttttttagacagagtctcactctgtttggcacgatcttggctcactgcagcctccacctcctgggttaaagcaattctcctgccccagccaactgagtagctgggattacaggcgtgccccaccacacccagctaatttttttatttttagtagagacagggtttcaccatgttgaccaggctggtctcaaactcctgacataaagtgatccacccgcctcagccttccaaagtgctgggattacaggtgtgagtcactgcgcccggcccaaggctgccatttaaaaaggggtgtaggctgggtcccatgggtcatgcctgtaattctagcactttgggaggctgaggcaggaggattgcttgaggccaggagttgagatcagcctgggcaacatagcaagacctcatctctataaaacaaaacaaaacaaacaaaccataaaataaaatcataaaatagggcagtcagggaaggcttgagtcagtgacgtttgagcacatactctttttctatattctcctatttaaaacttttaattaaaaagtactttaatgagggctggaggccagatggcacaggggcctgaccacctcctcttcacccactctgcaggttgacaaccagcgctcgcgcctgccagtctccctgagtgagggtcgcctgcgtgtgtaccagagcggaccacgggccgtggtggagctggtctttgggctggtggtcacttatgactgggactgccagctggcactcagcctgcctgcacgcttccaagaccaggtgtgcgggctgtgtggcaactataatggtgacccagcagacgacttcctcacgcctgacggggctctggctcctgacgctgtggagttcgcaagtagctggaagctggatgatggggactacctgtgtgaggatggctgccagaacaactgtcccgcctgcaccccaggccaggcccaacactatgagggcgaccgactctgtggcatgctgaccaagctcgatggccccttcgctgtctgccatgacaccctggaccccaggcccttcctggagcagtgtgtatatgacctgtgtgtggtcggtggggagcggctcagcctgtgccgtggcctcagcgcctatgcccaggcctgtctggagcttggcatctcggttggggactggagatcaccagccaactgccgtgagtgatgccctgggtgggggctgggagcatacagtgaggggcaggagatccctagcatctgcttaatatctgagaagttattatggttcagcctggtgctgggcaatgccaggggcctagtgatggccaagacagccagctctgtccacaatgagcctaaggttggagagacgtttcactagacattgacagtctggaggggtccaggcaggatggggaggcccactcggatgggttggggccaggatgggagagagacaggcagatgagtcagggctgggattgcgggggacacaggcagaggggttggggccaggatggaggaagtcagtggggctatgggaaaccagaggaggttcctggcccagcctggggagcaggggtggtcagggagggttttctagagaaagatgtccaatttgaaacccataagaggggctggaagttgccaagagaaagaggaggaagtgagttgcaggcccagagaacagcatgctcaaaggcttggcaggacgggaattcttgtctgcagaatcccaacacagagacgtgacgtctcttcctttgcctatagccctcccatgactcccattgccctctagataaagtccaggctctttagccaggtgtccgtctgcttaatcgttcactcattcattccacaagcattccttgaacccctgcctgccccctgtgcatgctaatgatattgaagacacagtgaagaccagcataaatctattcctgcccttgtgagtgaggctcctagagacatgtcccagaggcagaaaggacaggtaggagggaggaagaggcatccaggcccaggcccagagggagggggagtaagtacagggcagacatagaggccactaggtgtttgtcttggccagttctgtgtccccactgcccagtaagcacccccccaaccccatgcctggcgcaaaataggaatcagagagttcatttattctccctttcacttctgcagtatttcctgagcacctgctgcgtaccaggccctgtccttggtgctggggactcagcagtgattgagacagatcaggtccccactcccgcagaacttctctcttagcggcaggggagggacacagacagtgagcagatgaactaggaagtatcttcagagaggcaaagaaacaagttcattcaatgacagtgactgtgaggctcgtgaagagggtgatcagggaaggcctttctgggcaggtaacattggagctgagaccagggtcaggcaatggagtcagctaagtactaactaacagtgatgtccacagaatgtttccccatagatcaactcatttaatcctcacaacaaccctgtgaggtctcgactacattatcccatcttactgatggggaaactgaggcacggggagattggagtcagtggccgagaaggagagatctgggatctgaacccaggccacctgggccccagtgggctttctggggaaagggaaggcagagggaacagccaatgcaaaggccctgaggtgggagggtgaggacccgggaggaggaggcagctggggctggggcagagtgagcccgagggagagggagaagaggtgagggctgagaggtgagaggaacagatggcacagggcctcctgaggcatggggaggactctggcgtttaccctgagtgagaggaagccacagtagtgctctgagatggggagggacctgatctgacccagatgttcccagattcctcggcctggtgtgaggaacaggctgtgggggcaggagggagcccaggcaggaggctgctgcggtggataggatcagaggcagattctgtaactgggtggatttttttttttttttttgagacaaagtcttgctctgcgcccgggctggagtgcagtagtgtggtctcagctcactgcaacctccgccttccgggttcaagcgattctcctgcctcagcctcttgagtagctcggattacaggcctgcgccaccactcccggccaatctgggtagattttgaatatggagctcacaggacttgctgacagattggttgtccagtgagcgttagggggttggcggggtggagattaactgcgtcgctggggtgtggcgcaggagcacccagaagaatggcagtgccattatctgagatggcgagctctgagagaggagcagggtttggggatggaattcctgggcgccgtccccgacagggcgctcttcgacggcccctgctacgcgggcctgatccaccctctctgatctccccgcagccctgtcctgccctgccaacagccgctatgagctctgcggccctgcttgcccgacctcctgcaacggggctgcggcgccgtccaactgctccgggcgcccctgcgtggagggctgcgtgtgcctcccaggcttcgtggccagcggcggcgcctgcgtgccggcctcgtcgtgtggctgcaccttccagggtctccagctcgctccgggccaggaagtgtgggcggacgagttgtgccaaaggcgctgcacctgcaacggcgccacccatcaggtcacctgccgcgacaagcagagctgcccggcgggtgagcgctgcagcgtccagaacggcctcctgggctgctaccccgatcgcttcgggacctgccaggggtccggggacccacactatgtgagcttcgacggccggcgcttcgacttcatgggcacctgcacgtacctgctggtcggctcatgcggccagaacgcagcgctgcctgccttccgggtgctggtggaaaacgagcatcggggcagccagactgtgagctacacgcgcgccgtgcgggtggaggcccgcggggtgaaggtggccgtgcgccgggagtaccccgggcaagtgctggtgagcgacgtggcgcccagggctgggtgacggagcaggaaataccctctgaagacttggagttctggatgggcctgagggtgggggaggcctgttagaagattttatttttttcgttttcctttttcctttttgtgcagaacggagtcgcactaagttgcccaggccggtctccaactcctgggctcaagtgaccctcccgcctcagcttcctgaagtgctaggaagtgagctatgatcgtgccactccattctggcctgggtgacagagtgagacccctgtctctattttaaaaaggaagctagtggctgggcaccgtggctcacgcctgtaatcccagcattttgggaggctgaggcgagtggatcatctgaggtttgagaccatcctggccaacatggtgaaaccccctctctactaaaaatagaaaaaaaaattagccaggtgcagtggctcacacctgtaatcccagctactagggaggctgagagagaatcgcttgaacccaggaggcagaggttgtagtgagccaagattgtgccactgcactccagcctgggcaacagagtgagaccctgtccaaaaaaaaaaagaaaagaaagctagtatggttgcagcagcctgagtgagagggacagtgagaagaggtgaggcgagggaggtaatggggagatagacagatcatgtaggttttgaaggccatgggtgagggatttggatttaagctggtgctttaggaatgaagaggggtgaatggtgagccaggcagagggaacagcaagtgcaaaggcctcgaggtgggactgagcgtaatatgtccaagagaatagcaaggaggtcagggtagctggaggtgagtgaattgaagggtgggccacagaactgtgaataccctgaccaggtggccctcttgcatctccacccaggtggatgacgtccttcagtatctgcccttccaagcagcagatgggcaggtgcaggtgttccgacagggcagggatgccgtcgtgcgcacggactttggcctgactgtcacttatgactggaatgcacgagtgactgccaaggtgcccagcagctatgctgaggccctgtgtggactctgtgggaacttcaacggggacccagctgatgacctggctctgcggggtgggggtcaagctgccaatgcactggcctttgggaacagctggcaagaagagacgaggcccggctgtggagcaactgaaccgggtgactgtcccaagctggactccctggtggcccagcagctgcagagcaagaatgagtgtggaatccttgccgaccccaaggggcccttccgggagtgccatagcaagctggacccccagggtgccgtgcgcgactgtgtctatgaccgctgcctgctgccaggccagtctgggccactgtgtgacgcactggccacctatgctgctgcatgccaggctgctggagccacagtgcacccctggaggagtgaagaactttgccgtgagtatcggaagtggcaactgggggactcagccttatatatattcattaatgtataaatatcattaattcatttaatccttataatagccctatgaggtagggattgtggttatacccatttaacagatgaagaaattgaagttcagaaaggttcagttacacacctgggatcatgatagctagaaaatcacagatggtgggcatgcagttggtattttttttttagatggagtcttgctctgtcaccaggctggagtgcagtggcatgatctcggctcactgcaacctctgagtctggttcaagctattctcctgcctcagcctccagagtagctgggattacaggcatgcgccaccaagcccagctaatttttgtatttttagtagagatggggtttcaccatgttggccaggatggtctcgatctcctgaccacgtgatccgcccacctcagccttccaaagtgctgggattacaggcgtgagccaccgtgcccagcggcagttggtatttgtaaaatgactgagtacacctggtggcccagggtctgattcccacataacagctgtcattgagatatgagcaacagtattgtcattaggagtctcatcccctctctggttctttttggtccccatctatcctacctcgcttatttacatctgcctgaccccttgggcagtcagtttgagagccttgtttcagaggtgggtgcatgaatggttttccaacacctttgcttgcctatgaaagaagtttgaaaagccatgcatcctctcacctgattttttttaagatggggtcttgctctgttgcctaggctggagtgtagtggtgcaatcatagcttactgcagcctggaactcctgggctcaagcgattctcctgcctcagcctcctgagtagctgaaacggcaggcttgcaccaccatcccccgctaatttttaaaatattttttatagagacagggttttgatattttgcccaggctggtctcgggctcttgggctcaagcaatcctcctgcctcggcctctcaaaatactaggatgacaggtgtgagccatcgtaccagtttcctctcacccgatttttaatttaaaaaatttattattgaaatataatacagatatttaaaaatatgtacatatcataagctaacagcttgatcagttttcaccaagagaacaaacctgtgtgaactgtcccaaattcaagaaaaaaaaaaaatccaggttcccaaccccaagaggtaaccactattctgacttctaaagtttttgaattttggaattaatagaagcatacatgtctagtttttcacctgaaataatcataaaacttataatttctaacaaatggtaacttttgacttttaagaacctttttttttttttttttttgagatggagtctcactctgtcacccaggctggagtgcagtggcacgatctcagctcactgcaacctccgcctcctgggttcaagcaattctcctgcctcagcctcccaagtagctgggactacagacgcccgccaccatgcttggctaatttttttggtatttttagtagagagggggtttcaccatgttggccaggctggtttcgaactcctgacctcaagtgatccgcccaactcggtctcccaaagtgctagaattacaggcgtgagccactgctcatggccttaagaacatttttattagggaaaaatttaaacatatccaaagtaaactaggatagtgagccagcatatatccatcatttagtttccacaattatcaacataatattggtatttcaaaatgaaaccattacttgacttatgctcctcttttaaatgtattcaacagatacatagcacacagtggtacacatcattgtccactgaaaaatacaggataaatacatcattcctttttctccttcaacttacattcattcattcaacaaatatccaaaacattcaaaaataccttctgtattccaggcactattctaaacactccggatacaataggggagagaataagaaaacaaatccttgcctttctgaactgattttctaatgctttttagttctaacagaatttaacctaatgtaacacatttgaatgcatggaagtcttttgttaaagtcactgtatcagctggcttttggtgcctaacaaacaacccaaggcttagtggctgagtgcattaaaacaagtgtttatttttatttatttatttatttatttatttatttattgacatggagtctcgctctgttgcccaggctggagtgcaatggtgtgatctcggctcattgcaacctccgcctcctgggttcaagtgattcttctgtctcagcttcccaagtagctggaattacaggcatgtgccaccatgcccggctaattctttgtatttttagaagagatgggggtttcaccatgttagccaggctggtctcgatctcctgacttcaggtgatctgcccgcctcagcctcccaaagtgctgggattacaggtgtgagccaccatgcccggccaagtatttattctttctcatgattctgggggctgctgagctgttctcccagcctgggccagcttggttgatctctgcagtctgttggaggctcagccaaggccgggtaatctagggtgattttacacatctggcagttgtcaagctggttggtttggggggccctcagctgggaattcttgtctctgctctacttggtctcatcttccagcaggtgagccaaggcttcttcccaaggtgctctcaagattcctaagagcacacaagccccagtgtgcaagcactttccaaggctctacttggtatcatggtggccaatgtcccattggccaaagcaagtgccatggtcatgcccagagtcaagacgtgaccattggcagcctgtgtcacaatcgccatcacacttctctgccacaaacatacacatctatgactaagatttcagaatttttataatcccagctactcgggaggctgaggcagaagaatcgcttgaacccaggaggcagaggttgcagcgagccgagatcaagccactgcactccagcctgggcaacagagcgagattctgtctcaaaaaataaaataaaataaaataaaataaaataaaataataacagtgcagtctccactcatcccaaatctcaacacgtggcatgttgccctggggtgtgaaacctcccaggacaaaacagccttcttataaaagatataagaagttttagaaattcctgagactctaagactctaagtggtttttttaatggagtaagatatcattgcaagaattgtttgtgcacaattgataaaaatattaaacagaagtaaattgtaatggccattgtaatggcatcactcagtgagcttacccccacccaatatttcacatatattgttagaatgagacagggttcagcatcaattctaatcctatctttcatttttgtagatatgatatttatttatttttgagataaggtattatcctgtcaccgaggctggagtccagtggtgtgatcacagcttactgtagcctccatctttgggctcgagtagtcctcctgtgtcagcctcctgagtagctgggactacaggtgcacactaccatgcctggctaattttttattttttgtagacacaagatctcgctatgttgtccaggctggtctcaaactcctgggctcaagccttcctcccgccttggcctcccaaagtgctgagattacagacttgagccacagctcctggcttacatgatattaataagtgggtgggagtggacagagtgcaggtggagtaacatcactccgtgctctgaaccccttctgagtcatagggaaggcacacagtgagacacgacaaatttattttatattatctgtgagcagccaattctattaggccctccttttgatttattactcaataatgattcagcattcgttgtgttcacagcgatagcaatatttgaaatcgtccgtttatgtcctcagaggtttcacactccagggcactgtgccatgtgttaagattcaggatggggctgggtgtggtggctcatgcctgtaatcccagcactttgggaggctgaggcgggcagatcacttgaggtgaggagttcgagaccagcctggccaatatggcaaaaccctgtctctacaaaaaatacaaaagttagctaggcctggtggtgagcgcctgtaatcccagctacttgggaggttgaggcaggagaatcttagcttaaacctgggaggcagagattgcagtgagccgagatcgcaccactgcactccagcctggcccacagatcgagaccctgtctcaaaaaaaaaaaaaaaaagattcaggatgggtgggggactgcactgttctcttctgtaaagtgcaggaagcacacttgtgaaggggacaggtggacaatgggaagtgggaatgctcttctaacagagcattcttgggctgtccttttaggcaggacacgtataattccagctagcagttgtgtgacacgcatcccactgggcaggtcctgttctaagggtttctcattgaatcctcacaaccaccccgtgaggcagaattgctcttattcctattttacaagacgaggaaactgaaccacagagatgttaaggaactagcctgaggtcacacagccggtggggtgatttgaacaggctggctcctgattttgtgctgttaattatcagactctgtggcctgtgtggaaattgagaatctcttgtttccttaaaactactcctttccttgtaccacctggaagttctagaagactggatcatgaggtcttagatatgcagacggaggcctgacccagcttgaacaattattggtattttgccattcttagttcctctacctctcactccaccccctcttttttggtagaatattttagatcaaattctaggcagatcagttctcctctaactacttcagtaagcatctgcttttcagcaacaaaaaaggacttttaaggcacaggagtttgcttttcatgcctgtaatcccagcactttgggaggcctaggtggaaggatcgctggaggccaggagttcaagaccagcctgagcaacatagcaaaacccagtctctacaaaaataaaaataaagaataagccgggcatggtgactagtgcctatcatttcagctactcaggaggctaaggtgggagaatatcttcagcccaggaggtggaggtggcagtgaggcgagactgtgccactgcactccagtgaggccctgtctctaaaaaaaaaaaaaaaaaaaggaaggaagaaagaaagagatatgagggcatgtggtaattaccagtaacaacaataacattaattccctaacatcatgtaaagcccaatctgggttcaaattttcccaattgtctaaaaaaaaaaaaaggtttttttctattttgtttggctctagaaccaaaccaaatacacatactgcattggattgatctacctctttgcttttactctgtcagaatttccttcctttgttcctcccaacatagtattatgaaaattgtcaaatatacaaaaaagttgaaagaattttacagtgaagacccataaacctaccacctggactctacactctaattctttttcttttcttttttctttctttctttctttctttttttttttttttgagatggagtctcactctgttgcctaatctggagtgcagtggtgcaatctcagctcactgcaacctccgcctcccgggttcaagcgattctcccacctcagcctcccacgtagctgggattacagatgtgcgccatcatgcccagctaatttttgtatttttagtagaaacgggttttaccatgttggctaggctggtctcgaactcctgacctcaagtgatcctcctgcctcggcttccaaaaatgctggggttacaggtgtgagccaccgcgcccggcctcttcactctaattctaattcattcatttgccttatcacatagctatccctccatccagctcttccttttgtctatgtcacttatttactgggaaagataggttatttatcctgcagaatttcatactttcaggatctggctagttgctattttggagtgttattgaacttgtccctatgtccccatgattctcctgtaagctggatgtcagcttcagaacagcaccacccagcagaacttcaatgatgacagctccatatttgagctgttcaaatacataccaggtcaccacaggtcacatgtggctgctgagcacttgcaatgaggctgttgtgactgaggagctaaatcttcaattttgtttcattttaattaacttacatccaaatggtcacaagtggctagtggctactgtatttgacagcacagatagagatttaatgtggtttagttttagtcacttagatttgctttttatggagtgactggagtttggggaggggagcagggaggtttttctttttttctttataacactggctaaatattttaattactgctatagaaggaagaagctaaaagtattgcattcacaaatattgcatagattatacaaacacagaaatatatgcatatgcatgtttaaaatatatgccacatatcaacaccatgtatccaacttgaataaggtcattaaagacataatagaaggctgggtgtggtggctcattcctgcaatcccggcacttcgggaggctgaggcaggtggactgcttgagcccaggagtttgaggccagcctgggcaacatagcgagaccgcatctctataaaaaatttgaacagttagccaggcatgatggtgcacgcctatagtcccagctactcaggaggctgaagtgggaggattgcttgagcccaggaggtcaaagctgcagtgagctgtgatagcaagcaccaccgcgctccagcctgagtaacagagcgacccctatctcaaaaaaaaaaaaaaccataatagataactccaaaccatagttaaattgggaaagaatcttaattatcaggatcagattaactgcgatgtaatgtgttccccaagcaccctgcaatgggaccgcttgtgtgtgagtgtctttgagcatctgtgtgtgcatacgaatgtgttgggggaccgcttgtgtgtgtgtgagtgtgtttgagcgtgtgtgtgcatatgaatgtcttgggggaccacttgtgtgtgagtgtgtttgagtgtttgtgtgcatacgaatgtgttgagggaccacttgtatgtgagtgtgtctcgaactcctgacctgggagcaggaattcttgatcttgatgtctcctctccctgcagcactgagctgcccaccccacagccactatgaggcgtgttcctacggctgcccgctgtcctgtggagacctcccagtgcccgggggctgtggctcagaatgccatgagggctgcgtgtgcgatgagggctttgcgctcagtggtgagtcctgcctgcccctggcctcctgtggctgcgtacaccagggcacctaccacccaccaggccagaccttctaccctggccccggatgtgattccctttgccactgccaggagggcggcctggtgtcctgtgagtcctccagctgcggaccgcacgaggcctgccagccatccggtggcagcttgggctgtgtggccgtgggctctagcacctgccaggcgtcaggagacccccactacaccaccttcgatggccgccgcttcgacttcatgggcacctgcgtgtatgtgctggctcagacctgcggcacccggcctggcctgcatcggtttgccgtcctgcaggagaacgtggcctggggtaatgggcgagtcagtgtgaccagggtgatcacggtccaggtggcaaacttcaccctgcggctggagcagagacagtggaaggtcacggtgagagcagatggggaacagggggccaggggcctgtgggtgggtgggacacaggccgcgctcagcccaggagttgggggcacagagatgagagtgcatgtgcgaggcctggggtccctgaggacagaagatgccagtcagaacccagagtgggaagccaatgagggaggtgtcatcagggacttgggagctgctcccccatctctgtccctaagtctgcaccctctcttcacctccatgcattgacttttctttttcttttttttttttttttgagatggagtatggctctgtcgcccaggctgcaacgcaatggtgcgatctgggctcactacaacctccgcttcctgggttcagtggattctcctgcctcagcctcccaagtagctgggattacaggcgcccaccacaacacctggctaatttttctatttagtagagacagggtttcaccatgttggccaggctggtcttgaacgcctgaccttgtgatccacccgccttggcctcccaaagcgctaggattacaggcgtgagccactgcacctggccgcattgacttttctctccaaatctctcccactctctcctccctcccgcttcatcctctcctcacctcaatcctggattctgccctacccacctccctagtctgccactcattggcaggatgtgataccatcagaggttgggaaaaatcaagtctggagaagcttcatggacagaggacaatctgtgggtgacactctcaccgccttaacaacaacaacagcagctatagtttctatacagctgactgcacaccttttggctgccaggcacttcacgtccatggtgtctgtatgcttccaacaggggctgcaggcactatgacttgctttatttttcagagtgggacggcccatcactggcccatagtcccccagcaaaggtggagcttgaaccccatgctgctctgcagtgctttgctcactgagaagatttggtctcatgtggagactggcatctcagttatagtggaggggtttcccctgagatcccactgaaacagacacgcagctgtttttctagtagcagtattggcgaaggtgctgatcaattactgacttaatctggtgaactggacaggcgtgactttttttttttttttttttttttgagagacagtctcactttctcacccagactagagtgcagtggcgcgatctcaactcactgcaacctctgcctccctggttcaagtgattctcctgcctcagctacaagcacccgccaccatgcccagttactttattgcatttttagtagagacgtgggtttcaccatgttggccaggatggtctcaatctcctgacctcgagatccacccacttcggcctctcaaagtgctgggattacaggcgtgagccaccacatccggacaatttttttttttttatagagaggggtcttgctatgttgcccaggctggtctcgaactcctgggctcaagaaaccctcccaccttggcctcccaaagtgctggaattacagttgtgaaccactgctcctgaccaatttttttttttattttttttactttgtagagacaggatctccatatgttgctcaggctgaccttgaactcctgggctcaagtgatcttcccaccttggcctctcaaagtgctgggattatagatataagccactgtgcccagcccaggggtggatttaggaggctttgttggtgcctattaaccttaaactgaaaccactggtcctcagctcataggtttaagttcatttccccaagaatttagcctaactttccactcgctgatgctttaaagcaaaaacctgtggtgtctgtttactcttcaaaagaaaaaactccactcatagctgctaataacagcaaatgctcctgaagcatgcatgctatgccagccacgtttctcagcactttacaaatattaatttatctgatcctgacaacagttccgtggggcaaacaccttattcccgcctgatagatgaggaaacagaaacagggagaggtgactttgtgacccccaaggtcacaaagagggtaagggggaaactgtttgaactcgggcaagtggctctgggggcgatcattgcttattaatgactgcagcaagtggtaaacaaaggatagctggaggcttgttacttcatcgagacctgtattcgtttcccatggctgccataacaaattaccacgagcttggtggcttaaaacactagaaatgtatgttccacagtcctgggtgccagaagttcaacatcaaggtgtgggcagggctgcaccccttccaaagacactggttgggggatcttcctttccctttccagctctgcagactccaggttctctgggcttgtgacaccaccattctaatccctgccttcatcttcatgtggccctttctgtgtgtctctttgcctttttctttctggctcttataaggacacttgtcattggatttagggcccagtttaatccaggataatctcatgttgagattattaccctgattacatctgcaaagaactttattccaagtaagctcacgttatgggattctgggtgaatatgtcttttatggaccaccattcaatccactatcaggccctattattctaccaactttagagatacaaaaagtgaagccctaagaggtgtggtcacacagatcttcagcatcaggcatgggcttgaactagggtcctacccctactcaaagtctactttctgaagcgtggcctgcctctctcacctcccaggtgaacggtgtggacatgaagctgcccgtggtgctggccaacggccagatccgtgcctcccagcatggttcagatgttgtgattgagaccgacttcggcctgcgtgtggcctacgaccttgtgtactatgtgcgggtcaccgtccccggaaactactaccagcagatgtgtggcctgtgtgggaactacaacggcgaccccaaggatgacttccagaagcccaatggctcacaggcaggcaacgccaatgagttcggcaactcctgggaggaggtggtgcccgactctccctgcctgccgcccaccccttgcccgccggggagcgaggactgtatccccagccacaagtgtcctcccgagctggagaagaagtatcagaaggaggagttctgtgggctcctctccagccccacagggccactgtcctcctgccacaagctggtggatccccagggtcccttgaaagattgcatctttgatctctgcctgggtggtgggaacctgagcattctctgcagcaacatccatgcctacgtgagtgcttgccaggcggctggaggccacgtggagccctggaggactgaaactttctgtcgtgagtgagggagagccggaggggcagggaggggagagcttgaggcacagaaggggtagaccctgggccttgcagcccctccctccccagggctctgatcggcaccccctccttgcagccatggagtgccctccgaacagtcactacgagctctgtgcggacacctgctccctgggctgctcagctctcagtgcccctccacagtgccaggatgggtgtgctgagggctgccagtgtgactccggcttcctctacaatggccaagcctgcgtgcccatccagcaatgcggctgctaccacaatggtgtctactatgaggtaggaacctagtcatctggggcagaatatggggcctcacccctcccactgctcatcagccccacggcctgtctacttggcctcttatttatttcttttagagtcagggtctcactccgtcacccaggctggagggcaagggtaccatagctcactgcagccccgaattccttggctcaagcaatccttccacctcacctcccaagtgtctgggactataggcatgcaccaccaagcccagcgaatttttaattttcctgtggacacatagagatgggggcgaatcactatgtagctcaggctggtcttgaactccaggcctcaagccatcctcctaccttggcctccccaagggctgggattaatggcatgagccaccaggcccgacccactgagcctctttttttttttttttttttttaaatgacatagtcttgctctgtgcccaggccggagtgcaacctccactgcctgggttcaagctcactgcaacctcagcatcccaggttcaagtaattctcctgcgccagcctcccaagaagctaagactacaggcatgtgccaccacacatggttaatttttgtagttttgttagagatgggattttgccatattggccaggctgctctcaaattcctgactgcaagtgatcctcctgcgttggcctcccaaagtgtgagcattacaggcgtgagccaccacagctagtccactcagtctcttcaatgtctcttgtacccactcctttccccgtccccatggccctcccttggtccagctggtcctctcccacctgggtccctcccagctcctacctttgctccctctggtccaccctccacgtggcagtggtaaagatctttctaaatatgaccacgggctctgaagctttaaaccctcccctgactccccaggtcaagttgtggctttgccttccaggtctggacgaagggagcctttctgaccacaaagacaagattttcatgtgttataccagctgctaacaccctctacttccctctcccactctgtccccgttggtcctttttctttgactggagcatgtgtttgtccaatgtccatctcccttggggactgtgagctctcctggggtggaaccctctctctgttgttctcctcacatgaataataataataataacagaaaatgtgtagatagtgcttactatgtatctggtaccgttttaagtgctatgtgtgcatatttttatatatgcattacatatctaaaaactttttattctgaaaacgttcaaacatgcaaaaatcaagagaacagtggaatgactgtccatgtacttacccatcacttagcttcagaaataagccacattctcccaatcttgtttcatgtctaccccactcatctctcctatctgaatgatttaagggaaacccttttcctttcatctgcacttcacatgtgttattaacttggttatatttccataggcaggtgctactattatctgcaatttgcaaatcaggaaactgagccaacaagaggtgaggtaacttgcccagagtcacacagttcggaaacagcagaaacgggcttcaagcccaggcgatctgcccttagttactgtgtcacaccatttctcctacagcagacattgagcggatattttggaatgaatgagttaatgaagaaaagtgaatgaacaaatgtacaaatgaatcatggcctcaaagccatgctgtgcctcatcttcacagacaacgggccatcctgctgagagatgtcccttgtctgtgatgtctgccaaacccctctgtgccagaacgccagagatgtgagagtcggctcccacccgtggtgtccctgatggccgttccctctctccccacagccggagcagacagtcctcattgacaactgtcggcagcagtgcacgtgccatgcgggtaaaggcatggtgtgccaggaacacagctgcaagccggggcaggtgtgccagccctccggaggcatcctgagctgcgtcaccaaaggtgctgagctggggttgggcctggggctgatgcgactagggatggaggacaaggactctggggctgagggtggtgtaactggggtgtccatggcgggaggtgcacaggactaaagattgaggtcacagacctagggacccctgggctgggtttcatagggccagggttacctactatgggaggcagggacccttaaggggaatctaggctgtgcggaccctcagaggtaagtttctcagggtggctgtcagaggccctcagtataaggcaggcccaggcgcgcctttgctctaatgtgctacatggcaaatgtttaagctcgcagggtgcatggtctcgttccagctactcactctgccactgtggcatgaaagcagccgtagactatgtaagtgaagaggtcaggctcctataagactttagaatacaagagcagcagcctagggggccatcgtgagcagaacactgatgtgtgggattagttgtggggttcagacactagcagcacagggcaggggagagactgggatcccaggggcagggacagagagcagagttctgagtctcaggcacagagaccccaccaaggcaggatgttggatatggggacccatctcaagtggaagatcaggatttctaggagtatagtctctgatgtgggaatccccgagactaaatctgggacacagccacccccagggctcatttcttagggtgaagagcagagaactctcctccccctaaggataagagaatgggagctcccgcaccaaggagtgggggctaagactctcagggctgatgagcaggataatggggactcccaggaatggggggtatatcactcagcatctagtcgagagacagaaagcgtatggccatttgaatgaggaaagtttaattaaacatttacttattaataggagattaactattaagggtaaagagggcctgctgccgtggctcacacacccagcactttgggaggatcgcttgaggccaggagtttgagaccagcctgggcaacatagtgagacccctgtctccacaaaaaattgaaaattagccaggtgtggtgatgcgtgcctgtggtcccagctatttaggatgctgaggtaggaggatcagttgaccccaggatttcgaggctgcagtgagctatgattgcaccactgctctccagcctgggcaagacagcaagaccttgtctctttacaaataaataaataaacataaataagaaacggtaaagagagcactaaagaataccaccaaagcaaacataagaagtagctcccactctagggctaaggtagaggcctcaaggaagggagacattggcccctcctcttcaaggaggggagaatcagccccaaggctgagtccagtctcactgcagctgtagcccactgggtggcacagaggtttctgcaggctggacttggcaagaagggaacccctcactgggaagccagctgcggccagtggcactcgctgaatgtggccccgcaccctggccagagctggaaggaccaaactggctggaatccagaccagtagcccctccctcctgtggtgactctccagcgccctctgttgacaaagcttaactccgtgggtatatttgaagctgagaggcggtacattgataatggacacaggaggaaggagacgtttgaaggctggcctctcccacacagcggttccgcaagctggggtcacagatgtagtaactgtccgaacagggtctcggacacagaagccctccaggacagggcctcagcagtgagacacgctcaaggctactgtcttgaacacagcaaccctcagggatggagtcttgcactgagggagcccaggccatgagacttagctagttagggtctcaaacgtttgaaatcctgctgagaccctggcactgggctcttgccagagatcaccccagggccgtagtcttgggcatagaggcctccaggacctggagaaattggagaccaatttctctcaaatgtggagatgtccagggggctgagatctcaggcatggggggccctgaggcctagatctttttttttttttttttttttttgagataagtctcactctgtcgcccaggctggagtgtagtgatgcaatcatagctcactgcagcctccatctcctgggctcaaacaattctcccgcctcagccttctgagtagtgggggactacaggcacacaccaccatgcctggctcatttattaagttatttgtagaaatggggtcttgctatgttgcccaggcctggtctcaaactccagggctcaaatggtcctcccgtctcagcctcttaaagtgctgggattacaggcctgagccaccacacctggcctggggcccaggtcttgaacacagagaaccctggggctgggatctcagacatggatgctctcagggctggcatcgcagacacaaggacccctggggcacagatctcaactggggtcaagtgcaccttttctctaaagggctagatggtaagtgtttaagcttgcaggctataccttctggatcacaactactcactctgccactgtggtgtgaaagcagccgtagcctatgtaagtgaagacggtgaggtttctataaagctttagaatataagaacaggctgaactctcaagcaagggcacaatggaaactgtaacttaaaaacagaaatctgcaggaccagtgtctcaaacatggggaccccagagactgggtcttaggtgcagggactccaggacctcagtctcacacagcagatggcagggcctcagtctcagaggcagggggactctagggcctaagtcttggctgtagggacctctggggccgggatctcagatatgggaactttgacacccgagacatagacacagtccaccatgatgcctcagtgtcagatgtgcaggactcccaggggctggtcttgaaaatagcaggccgggcgtagtggctcaggcctgtaatcccagcactctgggaagctgaggtgggcaggtcacttgaggtcaggagctcaagaccagcctgggcaacatggtgaaaccctgtctctactaaaaatacaaaaatcagccaagcatgctggtgggcacctgtaatgccagctactcaggaggctcagtcaggacaatctcttgagcccgggaggcagaggttgtagtgagccaagattgcatcattgctctccagcctgggtgacagagaaagactccatctcaaaaaaccaataaaacaaaacaaaacaaaataaaaaagcaaactataggacctgggtcctagacatgaggactctggaatgtggtcttgcctgcagtaaccctcagatccctggcacagactggggtagatgtggagggagcggccatcctttacaatgggcagcccctcaaggtcctcctccctcttctgtccccagacccgtgccacggcgtgacatgccggccacaggagacatgcaaggagcagggtggccagggcgtgtgcctgcccaactatgaggccacgtgctggctgtggggcgacccacactaccactccttcgatggccggaagtttgacttccagggcacctgtaactatgtgctggcaacaactggctgcccgggggtcagcacccagggcctgacacccttcaccgtcaccaccaagaaccagaaccggggcaaccctgctgtgtcctacgtgagagtcgtcaccgtggctgccctcggcaccaacatctccatccacaaggacgagatcggcaaagtccgggtatgtgtggcaggatggtcccctgaggtccccgggagggcaggagggatcctgacgaccacagttagcagctcaaggctctttgtcttcacctgggcctgaaacaaactgtcaacaaagagaataattgcaacaaaaatgtcaccctgttactgggaattaaatgagcctagcccctggcaaagggctttaacataggacctcagcatttgccttttttatagacctgggtttcaatccagcctctcctccttatgagctatgtgatgctgggcagttcacttggtaggcctcagtttcctcatctgtgaagtgggcatcgtatcagggcctcccccacagcaaggccgtgcatgtcacatgctgagctcagagtctagtccaggtgaacagtcgtttgagtgtcggtgagggaaaagtgagaggcccagagaccaggacatggagagaaatacagggagatcgggctaggtgcggtggctcacgcctgtaatcccagcactctgggagaccgaggccgatggatcatctgaggtcaggagttcgagacaagcctggctaacatggtgaaattccgtctctactaaaaatacaaaaattagctgggtgtggtgatgctcctgaattctcagctactcaggacactgaggcaggagaattgcttgaacctgggaggcagaggttacaagagccgagactgcaacactgcacacaagcctcggtgacatagtgagactccgtctgaaaaataaaaaaagtaatcaagaaaaagaaatatagggagatgggggagaggaatgggctatcctttctgcccaaggaaatggagatgtagcttgatggcagctcacatggagagactgagtgatgcagcagagtaggcactgaataaatgatggtgagtgagtggaagagatgcacaaagaatgagggaggtagggaggaagggaaaagggtgagacagagacagagagacagaaagagagagagagagacagagacagagagagagaagacccagaggcatagccttaggtgaagacagggggagagagacacagagagagagacagagacaggggagggagatagagatgaagggagaagatctagaaaaagtaaagtgaggtttcgttccccaagacctgggctagaacaactgtccacagtgtgtcagatgacaatccaactctcgggggaaggccctggcctctcccagcccccggtgggatgagagagagggaggcagagggccagagctggggccgtaaaacctccagtgacccgtttgccttccctccttcccccaggtgaacggtgtgctcacagccttgcctgtctctgtggccgacgggcggatttcagtgacccagggtgcatcgaaggcactgctggtggctgactttggactgcaagtcagctatgactggaactggcgggtagacgtgacgctgcccagcagctatcatggcgcagtgtgcgggctctgcggtaacatggaccgcaaccccaacaatgaccaggtcttccctaatggcacactggctccctccatacccatctggggcggcagctggcgagccccaggctgggacccactgtgttgggacgaatgtcgggggtcctgcccaacgtgccctgaggaccggttggagcagtacgagggccctggcttctgcggacccctggcccccggcacagggggccctttcaccacctgccatgctcatgtgccacctgagagcttcttcaagggctgtgttctggacgtctgcatgggtggtggggaccgtgacattctttgcaaggctctggcttcctatgtggccgcctgccaggctgctggggttgtcatcgaagactggcgggcacaggttggctgtggtgagtgttgggggagcagaggcggggctgggggcggggtcccatctcttcggggctggtttggtttcactctggtccttctgggtctctttgttttcttttttctctgtttgtctctctgtttcttggtgctcgtctctgggcctcgctttgcttgtctctatctgtctgtttctcattctctagctccctcagtttctgcttgggtctcctggtgtctcgctttctcccatttctttctctgtgtcctctctctgtgtcttgttttctgtctccccctttctctgtctgctccctagtgtctctctctgtctcctcccaccctgttctgggaccccacccctaacacccttctttctgtttctctccttcctgctccttcatctgcccacagagatcacctgcccagaaaacagccactatgaggtctgtggctcaccctgcccggccagctgtccgtcccctgcaccccttacgacgccagccgtatgtgagggcccctgtgtggagggctgccagtgcgacgcgggtttcgtgttaagtgctgaccgctgtgttcccctcaacaacggctgcggctgctgggccaatggcacctaccacgaggcgggcagtgagttttgggctgatggcacctgctcccagtggtgtcgctgcgggcctgggggtggctcgctggtctgcacacctgccagctgtgggctgggtgaagtgtgtggcctcctgccatccggccagcacggctgccagcccgtcagcacagctgagtgccaggcgtggggtgacccccattacgtcactctggatgggcaccgattcaatttccaaggcacctgcgagtacctgctgagtgcaccctgccacggaccacccttgggggctgagaacttcactgtcactgtagccaatgagcaccggggcagccaggctgtcagctacacccgcagtgtcaccctgcaaatctacaaccacagcctgacactgagtgcccgctggccccggaagctacaggtgaggagggctgtgggccagacaggagcaagtgccagctctggggttgcctgagatggtaagggcttcaccattcccctgggcacctttcacagcttagctggggcatgatggaagggtcagagtgtacgcctaggagcctgacggcttggcacagcagcttcttcctctgtgagcctagtgtattcctctgtaaactggtctaggaaaagtacctgttttcgagaaggataaggagtcagtgacatgagccagtagaggctctttgtttttcttttctttttttctttcttgcttttctttctttctttctttctttcttttcttagcctgactctgttgcccaggctggagtgcagtgacaggattagggctcactgcagcctggaactcgtgggctgaatcgatcctcccgccttggcctccacctcccaagtatctgtgactaaaggcacacgccaccacgctggctaatttttcatttttttgtagagatgggggtctcactatgttgcccaggctgatctgaacttctggcgtcaagcgatcctcccatctcggccttccaaagtcctgggattgcaggctttgccaccaggcccggcctatagatgctcattattattttcagcgggaggtgacatgctctgggtcccacagctagtaggtagtggggccaggattcaaacccgtgtttgctccgttcaccgctcccccactgcccacaggtggacggcgtgttcgtcactctgcccttccagctggactcgctcctgcacgcacacctgagcggcgccgacgtggtggtgaccacaacctcagggctctcgctggctttcgacggggacagcttcgtgcgcctgcgcgtgccggcggcgtacgcgggctctctctgtggcttatgcgggaactacaaccaggaccccgcagacgacctgaaggcggtgggcgggaagcccgccggatggcaggtgggcggcgcccagggctgcggggaatgtgtgtccaagccatgcccgtcgccgtgcaccccagagcagcaagagtccttcggcggcccggacgcctgcggcgtgatctccgccaccgacggcccgctggcgccctgccacggccttgtgccgcccgcgcagtacttccagggctgcttgctggacgcctgccaagttcagggccatcctggaggcctctgtcctgcagtggccacctacgtggcagcctgtcaggccgctggggcccagctccgcgagtggaggcggccggacttctgtcgtgagtactgctccatgcatggtccacatagtagggtctctccctgcccttcccaggactgtaggacagcagccccttcctcctccatgaggctgaggggccaccttccttcccgagctcggtatctactgtcaggaaacaccttggcactgacacactgaaatgccccaagtcaggtactgcagtgagagagagtccgttagaaacacctagtcagagtgtgggcgcggtggctcacgcctgtaatcccagcaatttgggaggccgaggcgggcggatcacctgaggtcaggaggtcgagactagcccggccaacatggtgaaaccccacctctactaaaactacaaaaattatccgggcgtggtggcgggcacctgtaatctcagctactcaggaggctgaggcaggagaatcacttgaacccaggaggcagaggttgcagtgagccgagatcgtgccactgcccttcagcctgggtgacagagattccatctccaaaacaaaaaacaaacaaacaacaaacaacagaaaaaaaaaaagaaagaaaagaaacctggggtccaggacactcttagggattggtgatccatgctttcaggtatccaaggcatgtagattgggatggctgaccctgcctctgtcacatagcaaagtaccccttgttaggaagacctagtgagtttcagctggtcagagggcccaggtctgttgcacacactgaaatacacctagtcacatggaattagtcgcataccttcagtgatatctgcttaaattttatactgactggtcagatacactcagaaagaaacaggatcctggcatagccttgggcagatccacacagatgcatggttagatagtcctaggcggttcccttcaggcaggtctcctggtcacaggtatcctgccaacttcacccaggcacacccttaggcagaccatgtcagaaggactctgggagatgctgcatgtcagacacccacagctgggtgccctcaggcagagccataccctgagatacatgtggccccacaccccagtcacattcacacgctgagatgcccatagtcagttctgatcctgcataccccgaatagatataagtgatccatttcacccaggtaagcctggcttacatagtgagaccccatctctacacaaaataataataaatcagccagatgtggtggcttactcctgtagtcccagctaatcgggaggctgaggccagaggattgcttgaggtttaggtggaggctgcagcgagctgtgattgcgcctctgcactccagcctgggtgagatagagtgagagcctgtctcaaaaaaaaaaaaaaaaaaaaatcagccaagcagagtcatttgatcttcagaaatatttggtcagagagacctgggcatgtcccctcccattccaggtcccacgctgagtcccccagttagatgtcctggatcacatgtgcctacccagagacgcccaagttggcctgagcagttttcccactcagggcctcccaagactgcgactcaaacacctacctggctgatgcccaccttgtccccacagccttccagtgccctgcccacagccactacgagctctgcggtgactcctgtcctgggagctgcccgagcctgtcggcacccgagggctgtgagtcggcctgccgtgaaggctgtgtctgcgatgctggcttcgtgctcagtggtgacacgtgtgtacctgtgggccagtgtggctgcctccacgatgaccgctactacccactgggccagaccttctaccctggccctgggtgtgattccctttgccgctgccgggagggcggtgaggtgtcctgtgagccctccagctgcggcccgcatgagacctgccggccatccggtggcagcttgggctgcgtggccgtgggctctaccacctgccaggcgtcgggagatccccactacaccaccttcgatggccgccgcttcgacttcatgggcacctgcgtgtatgtgctggctcagacctgcggcacccggcctggcctacatcggtttgccgtcctgcaggagaacgtggcctggggtaatgggcgagtcagtgtgaccagggtgatcacggtccaggtggcaaacttcaccctgcggctggagcagagacagtggaaggtcacggtgagagcagatggggagcagggggcgaggggcctgtgggtaggtggggcacaggcagcgctcagcccaggagttgggggcacaagagatgagagtgcatgtgcgaggcctggggtctctgaggacagaagatgccagtcagaaccgagtgggaagccaatgagggaggtgtcatcagggacttgggagctgctcccccatctctgtccctcagtctccaccctctctttacctccatgcattgacttttctctccaaatttctcccaccctctcctccctcccactccatcctctctccacctcagtcctggattctgccctactcacctccctagtctgccacttattggcaggacgtggtgccatcagaggttgagaaagtccgagtttggagaagcttcatggacagaggacaatctgtgggtgacactctcaccgccttaacaacaacaacagcagctatagtttctatacagctgactgcacaccttttggctgccaggcacttcacgtccatggtgtctgtatgcttgcaacagggactgcaggcactatgacttgctttatttttcagagtgggatggcccatcactggcccatagtcccccagcaaaggtggagcttgaaccccgtgctgctctgcagtgcttttcttactgagaagatttggtctcatgtggagactggcatctgagttacagtggaggggtttcccctgagatcccactgaaacagacacgcagctgtttttctagtggcagtattggcgaaggtgctgatcaattactgacttaatctggcgaactggacaggcgtgactttttttttttttttttggcacagagtctggctttgtcacccaggctggagtgcagtggcgcgatctcggctcactgcaacctctgcctccctggttcaagtgattctcctgcctcagcctccagagtagctgggattacaggtgtgcaacactatgcccaggaaatttttgtatttttagtggggacgggtttcaccatgttggccagtctggtctccaactcctgagctcagtgatctgccggcctcagcctcccaaagtgctgggaatagaggcatgagccactgtgcccggccgacatgcaggacttaattgaatatattccctaatgtttcccaagctcctagaatagcccctgacatacagcgcctaaatacacaggagttgttgatgttcttgttagttgcttcttactgaaacccccagcttccctacagatgtgggagctcttattaccccgcagtttacagctgaggaaactgaggcaaggctaagtcagttgcccttacccaccgcccagccctgcttgggaagtgtggcagttgaccatctttttaggagactcagccaggagcatgtctttctcctgccttctcctctgattcttcacatttccaaaagaatccggtgtgcactgtctgtgataaggaagggtaagaaagcatgttaatcaggggttgatgtatttatttattttttagagacagggtctcgctctatcaccaaggctggagtgcagtggtgtgatcctagctcactgcagcctcaaactcctgctctcaagcaatcctaccacttcagcctcctgagtggctgggagtacaggcatgcaccaccatgcccagttaatttgttttcttttttattttgtagagacaggatctcgatatattgcttaggctgaccttgaactcctgggctcaagtgatcttcccgccttggcctctcaaagtgctgggattatagacatgagccactgtgccctgtccaggggtggatttaccaggctttgttggagcctagtaaatctttaactgaaaccactggtcctcagctcataggtttaagttcatttccccaagaatttagcctaactttccactcgctgatgctttaaagcaaaaacctgtggttctgtttactcttcagaagaaaaacctccactcatagctgctaataacagcaaatgctcctgaagcatgcatgctatgccagccacgtttctcagcactttacagatactaatttatgtgatcctgacaacagttccatggggcaaacgccttattcccacttgatagatgaggaaacagaaacagggagaggtgactcacttgcccaaggtcacaaagagggtaagggggaaactgtttgaactggggcaagtggctccgggggcgatcattgcttattaatggctgcagcaagcggtaaacaaaggatagctggaggcttgttacttcatcgagacctgtattcgtttcccatggctgccataacaaattaccacgagcttggtggcttaaaacactagaaatgtatgttccacagtcctgggtgccagaagttcaacatcaaggtgtgggcagggctgcaccccctccaaagacactggttgggggatcttcctttccctttccagctctgcagactccaggttctctgggcttgtgacaacaccattctaatccctgccttcatcttcatgtggccttttctgtgtgtctctttgcctttttctttctggctcttataaggatactagtcattggatttaaggcccaatttaatccaggataatctcatgttgagattattaccctgattacatctgcaaagaactttattccgagtaagctcacgctatgggattctgggtgaatatgtcttttggggaccaccattcaatctactatcaggccctgttattatatccatttaataaataggaaactgagggcctaaggggtgaggtcacaaagatcagcatcaggcatgggcttgaactagggtcccaccctcactcaaagtatactttctgaagcgtggcctgcctctcttcccctcccaggtgaacggtgtggacatgaagctgcccgtggtgctggccaacggccagatccgtgcctcccagcatggttcagatgttgtgattgagaccgacttcggcctgcgtgtggcctacgaccttgtgtactatgtgcgggtcaccgtccctggaaactactaccagctgatgtgtggcctgtgtgggaactacaacggcgaccccaaggatgacttccagaagcccaatggctcgcaggcaggcaacgccaatgagttcggcaactcctgggaggaggtggtgcccgactctccctgcctgccgccgcccacctgcccgccggggagcgagggctgtatccccagcgaggagtgtcctcccgagctggagaagaagtatcagaaggaggagttctgtgggctcctctccagccccacagggccactgtcctcttgccacaagctggtggatccccagggtcccttgaaagattgcatctttgatctctgcctgggtggtgggaacctgagcattctctgcagcaacatccatgcctacgtgagtgcttgccaggcagctggaggccaggtggagccctggaggaatgaaactttctgtcgtgagtgagggagagccggaggggcagggaggggagagcttgaggcacagaaggggtagaccctgggccttgcagcccctccctccccagggctctgatcggcaccccctccttgcagccatggaatgccctcagaacagtcactacgagctctgtgcggacacctgctccctgggctgctcggctctcagtgcccctctgcagtgcccagatgggtgtgctgagggctgccagtgtgactccggcttcctctacaacggccaagcctgcgtgcccatccagcaatgtggctgctaccacaatggtgcctactatgaggtaggaacctagtcatctggggcagaatatggggtctcacccctcccactgctcatcagccccacggcctgtctacttagcctcttatttatttcttttagagtcagggtctcactcttgtcacccagactggagtgcagtggtaccatcatagttcactgcagccccaaattccttggctcaagcaatccttcacctcacctcccaagtacctgggactataggtgcgcaccaccaagcccagcgaatttttaattttcctgtggacacatagagatgggggcgtctcactatgttgctcaggctggtcgtgaactccaggcctcaagccatcgtccccccttggccacccaaagtgctgggattaatggcatgagccaccatgcccgacccactgagcctctttttttttttttttttaaagatatagtcttgctctgttgcccaggctggagtgcaacctctgcctctcgggttcaagctcactgcaacctcagcatcccaggttgaagcaattctcttgtctcagcctcccgagtagctaggagtacaggcacgtgccaccacactcggttaattttttgtattttggtagaggtggagttttgccatattggccaggctgctctcgaactcctgacttcaagtgatcctcctgccttggcctcccaaagtgcgagcattacaggcgtgagccaccacagctagtccactcagtctcttcagtgtctcttgtacccactcctttccccgtccccatggccctcccttggtccagctggtcctctcccacctgggtccctcccagctcctacctttgctccctctggtccaccctccacgtggcagtggtaaagagctttctaaatatgaccacgggctctgaagctttaaaccctcccctgactccccaggtcaagttgtggctttgccttccaggtctggacgaagggagcctttctgaccacaaagacaagattttcatgtgttataccagctgctaacaccctctacttccctctcccactctgtccccattggtcctttttctttgactggagcatgtgtttgtctaatgtccatctcccttggggactgtgagctctcctaggggtggaaccctctctctgttgttctcctcacataaataatattaataataacagaaaatgtgtagatagtgcttactatgtatctggtaccgttttaagtgctatgtgtgcatatttttatatatgcattacatatctaaaaactttttattctgaaaacgttcaaacatgcaaaaattaagagaatagtggaatgactgtccatgtacttacccatcacttagcttcaaaaataagccatattctcccgatcttgtttgatgtctaccccacgtatctctcctatctgaatgttttaaaggaaacccttttctgtttttgttttttttttcccttgagttggagtctcgctctgtcactcaggctggagtgcagtggcgcagttttgcctcactgcaagctccgcctcccgagttcacaccattctcctgcctcagcctcccgagtagctgggactataggcgcccgccaccacgcccgactaattttttgtatttttagtagagacggggtttcaccgtgttagccaggatggtctcaatcttctgacctcgtgatccacccgcctcggcttcccaaagtgctgggattacaagcatgtgccaccgcgcccggcctacccttttcattttatctgaattttacatgtctgaatataacttggttattatctgaatataactcagttatatttccaaaggcaggcgctactatcatctgcaatctgcagatcatgaaactgagccataaagaggtgaagtaactgcccagagtcacacactttggaaacagcagaaatgggctccaagcccaggcgatctgcccttagttactgtgtcacaccatttctcctacagcagacgttgagtggatattttggaatgaatgagtaaatgaagaaaagtgaatgaaccaatgaatgatggccccaaagccatgctgtgcctcatcttcacagacaacgggccatcctgctgagagatgtcccttgtctgtgatgtctgccaaacccctctgtgccagaacgccagagatgtgagagtcggctcccacccgtggtgtccctgatggccgttccctctctccccacagccggagcagacagtcctcattgacaactgtcggcagcagtgcacgtgccatgtgggtaaagtcgtggtgtgccaggaacacagctgcaagccggggcaggtgtgccagccctccggaggcatcctgagctgcgtcaacaaaggtgctgggctgggctgggctgggactggggctgatgggactagggatggaggatggggactctggggctgcgggtagtgtaactggggtgtccatggcgggaggtgcacaggactaatgattgaggttgcagacctggggaaccctagaccaggtttcacagggccagggccacctactttgggaggtagggacccttagggaaaatccaggctgtggggaccctcagaggtagttttctcagggtggatgtcagagaccctcggtataaggcagggacaggcgcgcctttgctctaatgtgctacatggtaaatgtttaagctcgcaggctgtaggttctcgttccagctactcactctgccactgtggcatgaaagcagccgtagactatgtaagtgaagaggtcaggttcctataagactttagaatacaagagcagcagcctagggttccatcatgagcggaacactgatgtgtgggatcgggcttggggttcagacactagcaccaaagggcaggggagagactgggatcccaggggcagggacagagagcagagttctgagtctcacgcacggagacctcaccaaggcaggacattggatatggggacccctcttaactggaagatcaggatttctaggggtatagtctctgatgtgggaatcccccagactttacaaataaataaataaacataaataagaaacggtaaagagagcactaaagaataccaccaaagcacacacaggaagtagccgccactctagggctaaggtaaaagcctcatggaagggagaaattggccccttctcttcaaggaggggagaatcagccccaaggctgagtccagtctcactgcagctgtagcccactgggtggcacagaggtttctgcaggctggacttggcaagaagggaacccctcactgggaagccagctgcggccagtggcactcgctgaatgtggccccgcaccctggccagagctggaaggaccaaactggctagaagccagaacaggagcccctccctccttcagtgactctccagcgccctctgttgacaaagcttaactccgcgggtgtatttgaagctgagaggcggtacatagataatggacacaggaggaaggagacgtttgaaggctggcctctcccacacaggggttccgcaagctggggtcacagatgtagtaactgtacgaacagggtctcggacacagaaaccccccaggacagggcctcagcagtgagacacgatcaaggctactgtcttgaatacagcaaccctcagggatggagtcttgcactgagggagcccagcccatgagacttagctagttagggtctcaaacatttcaaatcctgctgagaccctggcactgggctcttgccagaagatcaccccagggccctagtcttgggcacagaggcctccaggacctagagaaattggagaccaatttctatcaaatgtggagatgtccagggggctgaggtctcaggcatgggggaccctgagacctagatcttttttttttttttgagctaaggtctcactctgtggcccaggctagagtgtagtgtagcttactgcagcctcgatttcctgggctcaaacaatcctcccgcctcagcctcccgagtagtgggggactacaggcacacaccaccacgcctggctaatttattaatctttctgtagaaatggggtcttactatgttgcccaggctagtctcaaactccagggctcaagctatcctcccacctcagcctcttaaagtgctgggattacaggcctgagccaccacacctggcctggggcccaggtcttgaacacagagaaccctggggctgggatctcagacatggatgctctcagggctggcatcgcagacacaaggacccctggggcacagatctcaactggggtcaagtgcaccttttctctaaagggctagatggtaagtgtttaagcttgcaggctataccttctggatcacaactactcactctgccactgtggtgtgaaagcagccgtagcctatgtaagtgaagacggtgaggttcctataaaacttaaaatacaagaacagggtgaaatctcaagcaagggcaccatggaaagtgcaccttaaacacagacccagagccttggtctttaccttggtcttaggtgcgtggactccaggatctcagtctcacacagcaaatggcagggcctcagtctcagaagtaggggaactctaggtactgggtcttggctgtacagacctctggggcccaggtctcaggtatgggacctttgacagccgagacttagacacagtcccccatggggcctcagtgtcagctgtgtgggactcccaggggctggtcttgaaaatagcaggctgggcatgatggctcatgcctgtaatcccaacactctgggaggccaaggttggctgatcacttgatgtcaggagcccgagaccagcctggccaacatggtgaaaccctgtctctactaaaaatacaaaaatcagccaagcatgctggtgggcacctataatcccagccactcaggaggctgagtcaggagaatcactggagcccaggaggcagaggttgcagtgagccgagattgtaccattgctctccagcctgggtgacagagaaagactccatctcaaaaaaacaacaaaacaaaagaaaatgtaaaagcaaactataggaagtgggtcctagacatgaggactctgtaatgtggtcttgcctgcagtaaccctcagatccctggcacagactgggtagatgtggagggagcggccatgctttacaatgggcagcccctcaaggtcctcctccctcttctgtccccagacccgtgccacggcgtgacatgccggccacaggagacatgcaaggagcagggtggccagggcgtgtgcctgcccaactatgaggccacgtgctggctgtggggcgacccacactaccactccttcgatggccggaagtttgacttccagggcacctgtaactatgtgctggcaacaactggctgcccgggggtcagcacccagggcctgacacccttcaccgtcaccaccaagaaccagaaccggggcaaccctgctgtgtcctacgtgagagtcgtcaccgtggctgccctcggcaccaacatctccatccacaaggacgagatcggcaaagtccgggtatgtgtggcaggatggtcccctgaggtccccgggagggcaggagggatcctgacgaccacagttagcagctcaaggctctttgtcttcacctgggcctgaaacaaactgtcaacaaagagaataattgcaacaaaaatatcaccctgttactgggaattaaatgagcctagcccctggcaaagggctttaacataggacctcagcatttgccttttttatagacctgggtttcaatccagcctctcctccttatgagctatgtgatgctgggcagttcacttggtaggcctcagtttcctcatctgtgaagtgggcatcgtatcagggcctcccccacagcaaggccgtgcatgtcacatgctgagctcagagtctagtccaggtgaacagtcgtttgagtgtcggtgagggaaaagtgagaggcccagagaccaggacatggagagaaatacagggagactgggctgggcccggtggctcacgcctgtaatcccagcactctgggagaccgaggccgatggatcatctgaggtcaggagttcgagacaagcctggctaacatggtgaaattccgtctctactaaaaatacaaaaattagctgggtgtggtgatgctcctgaattctcagctactcaggacactgaggcaggagaattgcttgaacctgggaggcagaggttacaagagccgagactgcaacactgcacacaagcctcggtgacatagtgagactccgtctgaaaaataaaaaaagtaatcaagaaaaagaaatatagggagatgggggagaggaatgggctatcctttctgcccaaggaaatggagatgtagcttgatggcagctcacatggagagactgagggatgcagcagagtaggcactgaataaatgatggtgagtgagtggaagagatgcacaaagaatgagggaggtagggaggaagggaaaagggtgagacagagacagagagacagaaagagagagagagagacagagacagagagagagaagacccagaggcatagccttaggtgaagacagagggagagagacacagagagagagacagagacaggggagggagatagagatgaagggagaagatctagaaaaagtaaagtgaggtttcgttccccaagacctgggctagaacaactgtccacagtgtgtcagatgacaatccaactctcgggggaaggccctggcctctcccagcccccggtgggatgagagagagggaggcagagggccagagctggggccgtaaaacctccagtgacccgtttgccttccctccttcccccaggtgaacggtgtgctcacagccttgcctgtctctgtggccgacgggcggatttcagtgacccagggtgcatcgaaggcactgctggtggctgactttggactgcaagtcagctatgactggaactggcgggtagacgtgacgctgcccagcagctatcatggcgcagtgtgcgggctctgcggtaacatggaccgcaaccccaacaatgaccaggtcttccctaatggcacactggctccctccatacccatctggggcggcagctggcgagccccaggctgggacccactgtgttgggacgaatgtcgggggtcctgcccaacgtgccctgaggaccggttggagcagtacgagggccctggcttctgcggacccctggcccccggcacagggggccctttcaccacctgccatgctcatgtgccacctgagagcttcttcaagggctgtgttctggacgtctgcatgggtggtggggaccgtgacattctttgcaaggctctggcttcctatgtggccgcctgccaggctgctggggttgtcatcgaagactggcgggcacaggttggctgtggtgagtgttgggggagcagaggcggggctgggggcggggtcccatctcttcggggctggtttggtttcactctggtccttctgggtctctttgttttcttttttctctgtttgtctctctgtttcttggtgctcgtctctgggcctcgctttgcttgtctctatctgtctgtttctcattctctagctccctcagtttctgcttgggtctcctggtgtctcgccctctcccatttctttctctgtgtcctctctctgtgtcttgttttctgtctccccctttctctgtctgctccctagtgtctctctctgtctcctcccaccctgttctgggaccccacccctaacacccttctttctgtttctctccttcctgctccttcatctgcccacagagatcacctgcccagaaaacagccactatgaggtctgtggcccaccctgcccggccagctgtccgtcccctgcaccccttacgacgccagccgtatgtgagggcccctgtgtggagggctgccagtgcgacgcgggtttcgtgttaagtgctgaccgctgtgttcccctcaacaacggctgcggctgctgggccaatggcacctaccacgaggcgggcagtgagttttgggctgatggcacctgctcccagtggtgtcgctgcgggcctgggggtggctcgctggtctgcacacctgccagctgtgggctgggtgaagtgtgtggcctcctgccatccggccagcacggctgccagcccgtcagcacagctgagtgccaggcgtggggtgacccccattacgtcactctggatgggcaccgattcgatttccaaggcacctgcgagtacctgctgagtgcaccctgccacggaccacccttgggggctgagaacttcactgtcactgtagccaatgagcaccggggcagccaggctgtcagctacacccgcagtgtcaccctgcaaatctacaaccacagcctgacactgagtgcccgctggccccggaagctacaggtgaggagggctgtgggccagacaggagcaagtgccagctctggggttgcctgagatggtaagggcttcaccattcccctgggcccctttcacagcttagctggggcatgatggaagggtcagagtgtacgcctaggagcctgatggcttggcacagcagcttcttcctctgtgagcctagtgtattcctctgtaaactggtctaggaaaagtacctgttttcgagaaggataaggagtcagtgacatgagccagtagaggctctttgtttttcttttctttttttctttcttgcttttctttctttctttctttcttttcttagcctgactctgttgcccaggctggagcgcagtgacaggattagggctcactgcagcctggaactcgtgggctgaatcgatcctcccgccttggcctccacctcccaagtatctgtgactaaaggcacacgccaccacgctggctaatttttcatttttttgtagagatgggggtctcactatgttgcccaggctgatctgaacttctggcgtcaagcgatcctcccatctcggccttccaaagtcctgggattgcaggctttgccaccaggcccggcctatagatgctcattattattttcagcgggaggtgacatgctctgggtcccacagctagtaggtagtggggccaggattcaaacccgtgtttgctccgttcaccgctcccccactgcccacaggtggacggcgtgttcgtcactctgcccttccagctggactcgctcctgcacgcacacctgagcggcgccgacgtggtggtgaccacaacctcagggctctcgctggctttcgatggggacagcttcgtgcgcctgcgcgtgccggcggcgtacgcgggctctctctgtggcttatgcgggaactacaaccaggaccccgcagacgacctgaaggcggtgggcgggaagcccgccggatggcaggtgggcggcgcccagggctgcggggaatgtgtgtccaagccatgcccgtcgccgtgcaccccagagcagcaagagtccttcggcggcccggacgcctgcggcgtgatctccgccaccgacggcccgctggcgccctgccacggccttgtgccgcccgcgcagtacttccagggctgcttgctggacgcctgccaagttcagggccatcctggaggcctctgtcctgcagtggccacctacgtggcagcctgtcaggccgctggggcccagctccgcgagtggaggcggccggacttctgtcgtgagtactgctccatgcatggtccacatggttgggtctctccctgcccttcccaggactgtaggacagcagccccttcctcctccatggggctcaggggccactttccttcccgagctcggtatctactgtcaggaaacaccttggcactgacacactgaaatgccccaagtcaggtactgcagtgagagagagtcagttagaaacacctagtcagagtgtgggcgcggtggctcacgcctgtaatcccagcaatttgggaggccgaggcgggcggatcacctgaggtcaggaggtcgagactagcccggccaacatggtgaaaccccacctctactaaaactacaaaaattatccgggcgtggtggcgggcacctgtaatctcagctactcaggaggctgaggcaggagaatcacttgaacccaggaggcagaggttgcagtgagccgagatcgtgccactgcccttcagcctgggtgacagagattccatctccaaaacaaaaaacaaacaaacaacaaacaacagaaaaaaaaaaagaaagaaaagaaacctggggtccaggacactcttagggattggtgatccatgctttcaggtatccaaggcatgtagattgggatggctgaccctgcctctgtcacatagcaaagtaccccttgttaggaagacctagtgagtttcagctggtcagagggcccaggtctgttgcacacactgaaatacacctagtcacatggaattagtcgcataccttcagtgatatctgcttaaattttatactgactggtcagatacactcagaaagaaacaggatcctggcatagccttgggcagatccacacagatgcatagttagatagtcctaggcggttcccttcaggcaggtctcctggtcacaggtatcctgccaacttcacccaggcacagccttaggcagaccatgtcagaaggactctgggagatgctgcatgtcagacacccacagctgggtgccctcaggcagagccataccctgagatacatgtggccccacaccccagtcacattcacacgctgagatgcccatagtcagttctgatcctgcataccccgaatagatataagtgatccatttcacccaggtaagcctggcttacatagtgagaccccatctctacagaaaataataataaatcagccagatgtggtggcttactcctgtagtcccagctaatcgggaggctgaggccagaggattgcttgaggtttaggtggaggctgcagcgagctgtgattgcgcctctgcactccagcctgggtgagatagagtgagagcctgtctcaaaaaaaaaaaaaaaaaaaatatcagccaagcagagtcatttgatcttcagaaatatttggtcagagagacctgggcatgtcccctcccattccaggtcccacgctgagtcccccagttagatgtcctggatcacatgtgcatgcccagagacgcccaagttggcctgagcagttttcccactcagggcctcccaagactgcgactcaaacacctacctggctgatgcccaccttgtccccacagccttccagtgccctgcccacagccactacgagctctgcggtgactcctgtcctgggagctgcccgagcctgtcggcacccgagggctgtgagtcggcctgccgtgaaggctgtgtctgcgatgctggcttcgtgctcagtggtgacacgtgtgtacctgtgggccagtgtggctgcctccacgatgaccgctactacccactgggccagaccttctaccctggccctgggtgtgattccctttgccgctgccgggagggcggtgaggtgtcctgtgagccctccagctgcggcccgcatgagacctgccggccatccggtggcagcttgggctgcgtggccgtgggctctaccacctgccaggcgtcgggagatccccactacaccaccttcgatggccaccgcttcgacttcatgggcacctgcgtgtatgtgctggctcagacctgcggcacccggcctggcctgcatcggtttgccgtcctgcaggagaacgtggcctggggtaatgggcgagtcagtgtgaccagggtgatcacggtccaggtggcaaacttcaccctgcggctggagcagagacagtggaaggtcacggtgagagcagatggggagcagggggcgaggggcctgtgggtaggtggggcacaggcagcgctcagcccaggagttgggggcacaagagatgagagtgcatgtgcgaggcctggggtctctgaggacagaagatgccagtcagaaccgagtgggaagccaatgagggaggtgtcatcagggacttgggagctgctcccccatctctgtccctcagtctccaccctctctttacctccatgcattgacttttctctccaaatttctcccaccctctcctccctcccactccatcctctctccacctcagtcctggattctgccctactcacctccctagtctgccacttattggcaggacgtggtgccatcagaggttgagaaagtccgagtttgagaagcttcatggacagaggacaatctgtgggtgacactctcaccgccttaacaacaacaacagcagctatagtttctatacagctgactgcacaccttttggctgccaggcacttcacgtccatggtgtctgtatgcttgcaacagggactgcaggcactatgacttgctttatttttcagagtgggatggcccatcactggcccatagtcccccagcaaaggtggagcttgaaccccgtgctgctctgcagtgcttttcttactgagaagatttggtctcatgtggagactggcatctgagttacagtggaggggtttcccctgagatcccactgaaacagacacgcagctgtttttctagtggcagtattggcgaaggtgctgatcaattactgacttaatctggcgaactggacaggcgtgacttttttttttttttttttggcacagagtctggctttgtcacccaggctggagtgcagtggcgcgatctcggctcactgcaacctctgcctccctggttcaagtgattctcctgcctcagcctccagagtagctgggattacaggtgtgcaacactatgcccaggaaatttttgtatttttagtggggacgggtttcaccatgttggccagtctggtctccaactcctgagctcagtgatctgccggcctcagcctcccaaagtgctgggaatagaggcatgagccactgtgcccggccgacatgcaggacttaattgaatatattccctaatgtttcccaagctcctagaatagcccctgacatacagcgcctaaatacacaggagttgttgatgttcttgttagttgcttcttactgaaacccccagcttccctacagatgtgggagctcttattaccccgcagtttacagctgaggaaactgaggcaaggctaagtcagttgcccttacccaccgcccagccctgcttgggaagtgtggcagttgaccatctttttaggagactcagccaggagcatgtctttctcctgccttctcctctgattcttcacatttccaaaagaatccggtgtgcactgtctgtgataaggaagggtaagaaagcatgttaatcaggggttgatgtatttatttattttttagagacagggtcttgctctatcaccaaggctggagtgcagtggtgtgatcctagctcactgcagcctcaaactcctgctctcaagcaatcctaccacttcagcctcctgagtggctgggagtacaggcatgcaccaccatgcccagttaatttgttttcttttttattttgtagagacaggatctcgatatattgcttaggctgaccttgaactcctgggctcaagtgatcttcccgccttggcctctcaaagtgctgggattatagacatgagccactgtgccctgtccaggggtggatttaccaggctttgttggagcctagtaaatctttaactgaaaccactggtcctcagctcataggtttaagttcatttccccaagaatttagcctaactttccactcgctgatgctttaaagcaaaaacctgtggttctgtttactcttcagaagaaaaacttccactcatagctgctaataacagcaaatgctcctgaagcatgcatgctatgccagccacgtttctcagcactttacagatactaatttatgtgatcctgacaacagttccatggggcaaacgccttattcccacttgatagatgaggaaacagaaacagggagaggtgactcacttgcccaaggtcacaaagagggtaagggggaaactgtttgaactcgggcaagtggctccgggggcgatcattgcttattaatggctgcagcaagcggtaaacaaaggatagctggaggcttgttacttcatcgagacctgtattcgtttcccatggctgccataacaaattaccacgagcttggtggcttaaaacactagaaatgtatgttccacagtcctgggtgccagaagttcaacatcaaggtgtgggcagggctgcaccccctccaaagacactggttgggggatcttcctttccctttccagctctgcagactccaggttctctgggcttgtgacaacaccattctaatccctgccttcatcttcatgtggccttttctgtgtgtctctttgcctttttctttctggctcttataaggatactagtcattggatttaaggcccaatttaatccaggataatctcatgttgagattattaccctgattacatctgcaaagaactttattccgagtaagctcacgctatgggattctgtgtgaatatgtcttttggggaccaccattcaatctactatcaggccctgttattatatccatttaataaataggaaactgagggcctaagaggtgaggtcacaaagatcagcatcaggcatgggcttgaactagggtcccaccctcactcaaagtatactttctgaagcgtggcctgcctctcttcccctcccaggtgaacggtgtggacatgaagctgcccgtggtgctggccaacggccagatccgtgcctcccagcatggttcagatgttgtgattgagaccgacttcggcctgcgtgtggcctacgaccttgtgtactatgtgcgggtcaccgtccctggaaactactaccagctgatgtgtggcctgtgtgggaactacaacggcgaccccaaggatgacttccagaagcccaatggctcgcaggcaggcaacgccaatgagttcggcaactcctgggaggaggtggtgcccgactctccctgcctgccgccgcccacctgcccgccggggagcgcgggctgtatccccagcgacaagtgtcctcccgagctggagaagaagtatcagaaggaggagttctgtgggctcctctccagccccacagggccactgtcctcctgccacaagctggtggatccccagggtcccttgaaagattgcatctttgatctctgcctgggtggtgggaacctgagcattctctgcagcaacatccatgcctacgtgagtgcttgccaggcggctggaggccacgtggagccctggaggaatgaaactttctgtcgtgagtgagggagagccggaggggcagggaggggagagcttgaggcacagaaggggtagaccctgggctttgcagcccctccctccccagggctctgatcggcaccccctccttgcagccatggaatgccctcagaacagtcactacgagctctgtgcggacacctgctccctgggctgctcggctctcagtgcccctctgcagtgcccagatgggtgtgctgagggctgccagtgtgactccggcttcctctacaacggccaagcctgcgtgcccatccagcaatgtggctgctaccacaatggtgtctactatgaggtaggaacctagtcatctggggcagaatatggggtctcacccctcccactgttcatcagccccacggcctgtctacttagcctcttatttatttcttttagagtcagggtctcactcttgtcacccaggctggagtgcagtggtaccatcatagttcactgcagccccaaattccttggctcaagcaatccttcacctcacctcccaagtacctgggactataggtgcgcaccaccaagcccagcgaatttttaattttcctgtggacacatagagatgggggcgtctcactatgttgctcaggctggtcgtgaactccaggcctcaagccatcgtcccgccttggccacccaaagtgctgggattaatggcatgagccaccatgcccgacccactgagcctcttttttttttttttttaaagatatagtcttgctctgttgcccaggctggagtgcaacctccgcctctcgggttcaagctcactgcaacctcagcatcccaggttgaagcaattctcttgtctcggcctcccgagtagctaggagtacaggcacgtgccaccacacacggttaatttttttgtattttggtagaggtggagttttgccatattggccaggctgctctcgaactcctgacttcaagtgatcctcctgccttggcctcccaaagtgcgagcattacaggcgggagccaccacagctagtccactcagtctcttcagtgtctcttgtacccactcctttccccgtccccatggccctcccttggtccagctggtcctctcctacctgggtccctcccagctcctacctctgctccctctggtccaccctccacgtggcagtggtaaagatctttctaaatatgaccacgggctctgaagctttaaaccctcccctgactccccaggtcaagttgtggctttgccttccaggtctggacgaagggagcctttctgaccacaaagacaagatttccatgtgttataccagctgctaacaccctctacttccctctcccactctgtccccgtaggtcctttttctttgactggagcatgtgtttgtctaatgtccatctcccttggggactgtgagctctcctaggggtggaaccctctctctgttgttctcctcacataaataatattaataataacagaaaatgtgtagatagtgcttactatgtatctggtaccgttttaagtgctatgtgtgcatatttttatatatgcattacatatctaaaaactttttattctgaaaacgttcaaacatgcaaaaattaagagaatagtggaatgactgtccatgtacttacccatcacttagcttcaaaaataagccatattctcccgatcttgtttgatgtctaccccacgtatctctcctatctgaatgttttaaaggaaacccttttctgtttttgtttttgtttttccttgagatggggtctcgctctgtcactcaggctggagtgcagtggcgcagttttgcctcactgcaagctccgcctcccgagttcacaccattctcctgcctcagcctcccgagtagctgggactataggcgcccgccaccacgcccgactaattttttgtatttttagtagagacggggtttcaccgtgttagccaggatggtctcaatcttctgacctcgtgatccacccgcctcggcttcccaaagtgctgggattacaagcatgtgccaccgcgcccggcctacccttttcattttatctaaattttacatgtctgaatataacttggttattatctgaatataacttggttattatctgaatataactcagttatatttccaaaggcaggcgctactatcatctgcaatctgcagatcatgaaactgagccataaagaggtgaagtaactgcccagagtcacacactttggaaacagcagaaacgggcttcaagcccaggcgatctgcccttagttactgtgtcacaccatttctcctacagcagacgttgagtggatattttggaatgaatgagtaaatgaagaaaagtgaatgaaccaatgaatgatggccccaaagccatgctgtgcctcagcttcacagacaaggggccatcctgctgagagatgtcccttgtctgtgatgtctgccaaacccctctgtgccagaacgccagagatgtgagagtcggctcccacccgtggtgtccctgatggccgttccctctctccccacagccggagcagacagtcctcattgacaactgtcggcagcagtgcacgtgccatgtgggtaaagtcgtggtgtgccaggaacacagctgcaagccggggcaggtgtgccagccctccggaggcatcctgagctgcgtcaccaaaggtgctgggctgggctgggctgggactggggctgatgggactagggatggaggatggggactctggggctgagggtagtgtaactggggtgtccatggcgggaggtgtacaggactaatgattgaggttgcagacctggggaaccctagaccaggtttcacagggccagggccacctactttgggaggtagggacccttagggaaaatccaggctgtggggaccctcagagatagttttctcagggtggatgtcagagaccctcggtataaggcagggacaggcgcgcctttgctctaatgtgctacatggtaaatgtttaagctcgcaggctgtaggttctcgttccagctactcactctgccactgtggcatgaaagcagccgtagactatgtaagtgaagaggtcaggttcctataagactttagaatacaagagcagcagcctagggttccatcatgagcggaacactgatgtgtgggatcgggcttggggttcagacactagcaccaaagggcaggggagagattgggatcccaggggcagggacagagagcagagttctgagtctcacgcacggagacctcaccaaggcaggacattggatatggggacccctcttaactggaagatcaggatttctaggggtatagtctctgatgtgggaatcccccagactaaatctgggacacagccacccccagggctcatttcttagggtgaagagcagagaactctcctccccctaaggataagagaatgggagctccagcaccaaggagtgggggctaagactctcagggctgatgagcaggataatggggactcccaggaatggggggtatatcactcagcatctagtcgagagacagaaagcgtatggccatttgaatgaggaaagtttaattaaagaatcacttacttattaataggagattaactattaagggtaaagagggtctggtgccgtggctcacacacccagaactttgggaggatcacttgaggccaggagttcgagaccagcctgggcaacatagcgagacccctgtctccacaaaaaattgaaaattagccaggtgtggtgatgcgtgcctgtggtcccagctatttaggatgctgaggtaggaggatcagttgaccccaggatttcgaggctgcagtgagctatatgattgcaccactgctctctagcgtgggcaagacagcaagaccttgtctctttacaaacaaacaaataaacagaaataagaaacggtaaagagagcactaaagaataccaccaaagcacacacaggaagtagccgccactctagggctaagttaaaagcctcatggaagggagaaattggtccctcctcttcaaggaggggagaatcagccccaaggctgagtccagtctcactgcagctgtagcccactgggtggcacagaggtttctgcaggctggacttggcaagaagggaacccctcactgggaagccagctgcggccagtggcactcgctgaatgtggccccgcaccctggccagagctgaaaggaccaaactggctagaagccagacccggagaccctccctcctgcagtgactctccggcgccctctgttgacaaagcttaactccgtgggtgtatttgaagctgagaggcggtacattgataatggacacaggaggaaggagacgtttgaaggctggcctctcccacacaggggttccgcaagctggggtcacagatgtagtaactgtacgaacagggtctcggacacagaaaccccccaggacagggcctcagcagtgagacacgatgaaggctactgtcttgaatacagcaaccctcagggatggagtcttgcactgagggagcccagcccatgagacttagctagttagggtctcaaacatttcaaatcctgctgagaccctggcactgggctcttgccagaagatcaccccagggccctagtcttgggcatagaggcctccaggacctagagaaattggagaccaatttctatcaaatgtggagatgtccagggggctgaggtctcaggcatgggggaccctgagacctagatcttttttttttttttgagctaaggtctcactctgtggcccaggctagagtgtagtgtagcttactgcagcctcgatttcctgggctcaaacaatcctcccgcctcagcctcccgagtagtgggggactacaggcacacaccaccacgcctggctaatttattaatctttctgtagaaatggggtcttactatgttgcccaggctagtctcaaactccagggctcaagctatcctcccacctcagcctcttaaagtgctgggattacaggcctgagccaccacacctggcctggggcccaggtcttgaacacagagaaccctggggctgggatctcagacatggatgctctcagggctggcatcgcagacacaaggacccctggggcacagatctcaactggggtcaagtgcaccttttctctaaagggctagatggtaagtgtttaagcttgcaggctataccttctggatcacaactactcactctgccactgtggtgtgaaagcagccgtagcctatgtaagtgaagacggtgaggttcctataaaacttaaaatacaagaacagggtgaaatctcaagcaagggcaccatggaaagtgcaccttaaacacagacccagagccttggtctttgccttggtcttaggtgcgtggactccaggatctcagtctcacacagcaaatggcagggcctcagtctcagaggtaggggaactctaggtactgggtcttggctgtacagacctctggggcccaggtctccggtatgggacctttgacagccgagacttagacacagtcccccatggggcctcagtgtcagctgtgtgcgactcccaggggctggtcttgaaaatagcaggctgggcatgatggctcatgcctgtaatcccaacactctgggaggccaaggttggctgatcacttgatgtcaggagcccgagaccagcctggccaacatggtgaaaccctgtctctactaaaaatacaaaaatcagccaagcatgctggtgggcacctataatcccagccactcaggaggctgagtcaggagaatcactggagcccaggaggcagaggttgcagtgagccgagattgtaccattgctctccagcctgggtgacagagaaagactccatctcaaaaaaacaacaaaacaaaagaaaatataaaagcaaactataggaagtgggtcctagacatgaggactctggaatgtggtcttgcctgcagtaaccctcagatccctggcacagactgggtagatatggagggagcggccatgctttacaatgggcagcccctcaaggtcctcctccctcttctgtccccagacccgtgccacggcgtgacatgccggccacaggagacatgcaaggagcagggtggccagggcgtgtgcctgcccaactatgaggccacgtgctggctgtggggcgacccacactaccactccttcgatggccggaagtttgacttccagggcacctgtaactatgtgctggcaacaactggctgcccgggggtcagcacccagggcctgacacccttcaccgtcaccaccaagaaccagaaccggggcaaccctgctgtgtcctacgtgagagtcgtcaccgtggctgccctcggcaccaacatctccatccacaaggacgagatcggcaaagtccgggtatgtgtggcaggatggtcccctgaggtccccgggagggcaggagggatcctgacgaccacagttagcagctcaaggctctttgtcttcacctgggcctgaaacaaactgtcaacaaaaagaataattgcagcaaaaatgtcaccctgttactgggaattaaatgagcctagcccctggcaaagggctttaacataggacctcagcatttgccttttttatagacctgggtttcaatccagcctctcctccttatgagctatgtgatgctgggcagttcacttggtaggcctcagtttcctcatctgtgaagtgggcatcgtatcagggcctcccccacagcaaggccgtgcatgtcacatgctgagctcagagtctagtccaggtgaacagtcgtttgagtgtttgtgagggaacaagtgagagacccagagaccaggacacagagagaaatacagggagatcgggctaggtgcggtggctcacgcctgtaatcccagcactctgggaggccgaggcgggtggatcacctgaggttagtagttcgagaccagcctcgccgatatggtgaaacccccatctctactaaaaatacaaaaattagctgggtgtggtggtgctactgtaatcccagctactctggaaactgaggcaggagaatcacttgaacctgggaggtggaggttacaagagccaagatttcgacactgtactgcagcctgggtgacagagtgaggatctgtctcaaaaaaaaaaaaaaaaaaaaagaaagaaagaaagaaatatagggagatatgtagggagatcagaggagacagatgggctatcctttctgcccagggaaatggagatagagcttaatggtagctcacagagagaaaatgagggatggaacagagtaggcactggataaatgatggtgagtgagtggaagagacacacagagaatgagggtaggagggaggaagggaagaggagggagagatagacagagagacagaaagagagagagagaagaccaagtgatatagacttaggtgaagacagagggagagagacacagaaagacagagagacagagagacagaagagggagatagagatgaagggagaagatctagaaaaagtaaagtgaggtttcgttccccaagacctgggctagaacaactgtccacagtgtgtcagatgacaatccaactctcgggggaaggccctggcctctcccagcccccggtgggatgagagagagggaggcagagggccagagctggggccgtaaaacctccagtgacccgtttgccttccctccttcccccaggtgaacggtgtgctcacagccttgcctgtctccgtggccgacgggcggatttcagtggcccagggtgcatcgaaggcactgctggtggctgactttggactgcaagtcagctatgactggaactggcgggtagacgtgacgctccccagcagctatcatggcgcagtgtgcgggctctgcggtaacatggaccgcaaccccaacaatgaccaggtcttccctaatggcacactggctccctccatacccatctggggcggcagctggcgagccccaggctgggacccactgtgttgggacgaatgtcgggggtcctgcccaacgtgccctgaggaccggttggagcagtacgagggccctggcttctgcggacccctttcatctggcacagggggccccttcaccacctgccatgctcatgtgccacctgagagcttcttcaagggctgtgttctggacgtctgcatgggtggtggggaccgtgacattctttgcaaggctctggcttcctacgtggccgcctgccaggccgctggggttgtcatcgaagactggcgggcacaggttggctgtggtgagtgttgggggagcagaggtggggcggggggcggggtcccgtctcttcggggctggtttggtttcactctggtccttctgggtctctttgttttcttttttctctgtttgtctctctgtctcttggtgctcatctctgggcctcgctttgcttgtgtctatctgtctgtttctcattctctagctccctcagtttctgcttgggtctcctggtgtctcgccctctcccatttctttctctgtgtcctctctgtgtcttgttttctgtctctccctttttctgtctgctccctagtatctctgtctcctcccaccctgtcctgggaccccacccctgacacccttctctctatttctctccttcctgctccttcgtctgcccacagagatcacctgcccagaaaacagccactatgaggtctgtggcccaccctgcccagccagctgtccgtcccctgcaccccttacgacgccagccgtatgtgagggcccctgtgtggagggctgccagtgcgacgcgggtttcgtgttaagtgctgaccgctgtgttcccctcaacaacggctgcggctgctgggccaatggcacctaccacgaggcgggcagtgagttttgggctgatggcacctgctcccagtggtgtcgctgcgggcctgggggtggctcgctggtctgcacacctgccagctgtgggctgggtgaagtgtgtggcctcctgccatccggccagcacggctgccagcccgtcagcacagctgagtgccaggcgtggggtgacccccattacgtcactctggatgggcaccgattcgatttccaaggcacctgcgagtacctgctgagtgcaccctgccacggaccacccttgggggctgagaacttcactgtcactgtagccaatgagcaccggggcagccaggctgtcagctacacccgcagtgtcaccctgcaaatctacaaccacagcctgacactgagtgcccgctggccccggaagctacaggtgaggagggctgtgggccagacaggagcaagtgccagctctggggttgcctgagatggtaagggcttcaccattcccctgggcccctttcacagcttagctggggcatgatggaagggtcagagtgtacgcctaggagcctggtggcttggcacagcggcttcttcctctctgagcctagtgtattcctctgtaaactggtctaagaaagtacctgtttttgagaaggatgaggagtcagtgacatgagcctatagaggctctttgttttttcttttctgtttttctttctttctttcttttcttagcctgactctgttgcccaggctggagtgcagtgacaggattagggctcactgtagcctggaactgctgggctcaatccatcctcccgccttggcctccgcctcccaagtggctgggactaaaggcgcaggccaccatgctggctaatttttcattttttttgtagagatgggggtctcactatgttgcccaggcgggtctgaacttctgacctcaagtgatcctcccatctcgtccttccaaagtactgggattgcaggctttgccaccaggcccggcctatagatgctcattattattttcagaggggaggtgacatgctctgggtcccacagctagtaggtggtggggccaggattcaaacccgtgttctctccactcaccgcgccccatccccccgccgccatcccccgcccgcaggtcgacggcgtgttcgtggctctgcctttccagctggactcgctcctgcacgcacacctgagcggcgccgacgtggtggtgaccacaacctcagggctctcgctggctttcgatggggacagcttcgtgcgcctgcgcgtgccggcggcgtacgcggcctctctctgtggcttatgcgggaactacaaccaggaccccgcagacgacctcaaggctgtgggcgggaagcccgctggatggcaggtgggcggggcccagggctgcggggaatgtgtgtccaagccatgcccgtcgccgtgcaccccagagcagcaggagtccttcggcggcccggacgcctgcggcgtgatctccgccaccgacggcccgctggcaccctgccacggccttgtgccgcccgcgcagtacttccagggctgcttgctggacgcctgccaagttcagggccatcctggaggcctctgtcctgcagtggctacctacgtggcagcctgtcaggccgctggggcccagctcggcgagtggaggcggccggacttctgtcgtgagtactgctccatgcatggtccacatggttgggtctctccctgcccttcccaggactgtaggacagcagccccttcctcctccatggggctcaggggccactttccttcctctgagcttggtatctcctgtcaccaaacaccttggcactcacacactgaaatgccccaagaaaggtactgcagtgagagagagttagaaacacctagtcagagtgtgggcgtggtggctcacgcctgtaatcccagcactttgggaggccgaggcaggtggatcacctgaggtcaggaagttgagactagcccggccaacatggtgaaatccctgtccctactaaaaatacaagatttatctgggcgtggtggtgggcacctgtaatcccagctaatcaggaggctgaggcacttgaacccaggaggcagaggttgcagtgagccatgatgtgacactgcattccagcctgggcaacagagtgagacaccatctcaaaaaaaaaaaaagaaagaaagaaaagaaacacctagtcagaaacctggggtccaggacactgttgaggattggtgatccatgctctcagatatccaaggcatgtagattgggatggctgactctgcctcagtcacacagcaaggtacccctggttaggaagacctagtgagttacagctggtcagaggcccttggtctgttgcacacactgaaatacacctagtcacatagaataagtcacataccttcagtggtatctgctcagattttgtactgagactaactggttagatacactcagatagaatcaggactcttacatagccctgggcagatccacacagatgcatggttagatagtcctaggcggttcccttcaggcaggtctcctggtcacaggtatcctgccaacttcacccaggcacacccttaggcagaccatgtcagaaggactctgggagatgctgcatgtcagacacccacagctgggtgccctcaggcagagccataccctgagatacatgtggccccacaccccagtcacattcacacgctgaggtacccatagtcagttctgatcttgcataccccgaatagatataagtgatccatttcacccaggtaagcctggcttacatagtgagaccccatctctacagaaaactactaataaattagccagatgtggtggctcatacctgtagtcccagatactcggggggctgaggcaggatgatcgcttgagcccaggaggtggaggctgcagtaagcgcgcctctgcactccagcctgggtgagatagagtgagaccctgtctcaaaaaaataaaaaataaataaataaataaataaataaaaatcaggcaagcagagtcatttgatcttcagaaatatttggtcaggctaacacataacctggtcagagagaccagggcatgtcccctcccattccaggtcccacactgagtcccccagttagatgtcctggatcacatgtgcatacacagagacactcaagttggcctgagcagttttcccactcagggcctcccaagaccccgactcgaacacctacctggctcatgcccaccttgtccccacagccttgcagtgccctgcccacagccactatgagctctgcggtgactcctgccctgtgagctgcccgagcctctcagcacccgagggctgtgagtcggcctgccgtgaaggctgtgtctgcgatgctggcttcgtactcagtggtgacacctgcgtacccgtgggccagtgtggctgcctccatgatggccgctactacccactgggcgaggtcttctacccgggccctgagtgtgagcggcgctgtgagtgtgggccaggtggccatgtcacctgccaggagggcgcagcctgtgggccccatgaggagtgccggttagaggatggtgtccaggcctgtcatgccacaggctgtggccgctgcctggccaacgggggcatccactacatcacccttgatggccgtgtctacgacctgcatggctcctgctcctatgtcttggcccaagtctgccacccaaagcctggggacgaggacttttccatcgtgcttgagaagaatgcagctggagatctccaacgcctcctggttactgtggctggccaggttgtgagcctagctcaggggcagcaggtgagtccatgtgagcctgccctgggggtctgaaggcaacacagccccatctagggggttctgagggagacacgaccccaccctgtaggtatgagagggacattcctctaacatgggaactctggtacctaccctggaaggtttggtgaatggtcccaccgtgggagatttttgtgttgttttgtgacagggtcttgttctgtcacccaggctggagtatattggcgtgatcacagctcactgcaggctcaacctgctgggctcaagcaatcctcccacctcagccccccatgcctagctaattttttatttttggtagagatgaggtcttgctgtcacggccaggctggtctcgaactcctgggctcaagtgatccacctgtctgggcctcccaaagtgctgggattataggtgtgagtcaccacgccaggcctggggcccaagaagtttaagggaaacatgacctgacgttaatgggactgagggagatgcagctctggcctgggagtgggacaggacagccttgcctgtggttctgtgagttcctgacctacccgacccttccacccaggtcaccgtggacggcgaggctgtggccctgcctgtggctgtgggccgcgtgcgggtgaccgccgagggccgaaacatggttctgcagacgaccaaggggctgcggcttctctttgatggcgatgcccacctcctcatgtccatccccagccccttccgtggacggctctgtggcctctgtgggaacttcaatggcaactggagtgacgactttgtcctgcccaatggctcagcagcgtccagtgtggagaccttcggggctgcatggcgggcgcccggctcctccaagggctgtggcgagggctgcgggccccaaggctgcccagtgtgcttggcagaggagactgcaccctatgagagcaacgaggcctgcgggcagctccggaacccccagggccccttcgcgacctgccaggcggtgctgagtccctctgagtacttccgccaatgcgtatacgacctgtgcgcgcaaaagggtgacaaagccttcctgtgccgcagcctggcagcctacacggcggcctgtcaggcagctggcgtggccgtgaagccctggaggacagacagcttctgccgtgagtgtccgtgggtccctcgcaggactctagaccaggtgtaggggcccctcctggcccattccttctatttgcatgtcggagtggtttctccctgtaaaagcgctccctccccaccccctcccaccccacacccacacaacttcttctcccacggcatagtccactggcttccctgctatccctctgactgttccttctcagcctcctgtctgggcccactctgctcaaacctcaaattctcttcttccctagtgttctattctggactctttctgcagtgacctgaaagggagagttggatgggttgggagatctgtggctcacacagaccctccttctacccccgacaagaccatatcccctcagatccccccaagacaaggctgcaggctattaaacaccccgctaaactaggactgtacctctcattcaattccccatgggagggacatcaccagagactctcaggaaaaagcaatggccccttcggctccaggtcagagccaggtctcccctgggcaggacctatacccagggcggtcatccacacccgcggccttagatttgttctcattgttgaccatggacctggtctgtctgtctcaagccctgaactctctcctgactgtcagcccagtgatcctgatttctgacttctggccttcagaactgtgggagaatgaatttcccctgtttaagctacaaagtctgtggtaattgttagggtgtccaagacaccttcccctgggtgtccttaccgtccctcttacctgctgtgttcccaaataaaatcagcatttcacccccagcctgatgctccttccccaaacctggtgggcattgcagaacagccacacctccaccaattgcttagccagagaccagggacttaccacagataattcccttgggtccatatagcccctgtcccaactctgacccctctgcctgtgcccccctatcccagccctgacccctttgcctgtgccccccacaccctggccctgacccctctgcctgtgccccctacccagccctgacccctctgcctgtgccccctaccccggccctcaaccctctgtgtgtaccctccccatcccggccctgacccctctgcctttgcccccccaccccagccctgacccctttgcttgtgcccccaaccccagccctcaaccctctgtttgtgccctccccatcctggcgctgacccctctgcctgtgtgcccccactctggccccgacctctttgcctgtgcccccgaccctggtcctgacccctctgcctgtgccccctaccctggccctcaaccctctgtctgtgccctccccatcccagccctgacccttctgtctgtagccccctaccctggccctgacccctctgcctttgccccctcatgcctgccctgacccctctgcctgtgcctccccaccctgaccctgacctctctgtctacactccctgatgcagcatgttcactttgggctcttcctgtctgtcccactggaagtgagctctgtaggactggggttgagacttttctcagtatttgtgtcctcagcaccgcctaaaacagggctgggtgtgcagtaggcccccttggttatccaggaccctttggaggtgtgactcagccctgcctcctctctctgcagcgctccattgccccgcccacagccactactccatctgcactcgcacctgccagggatcctgtgcggctctctccggcctcacgggctgcaccacccgctgttttgagggctgtgagtgcgacgaccgcttcctgctttcccagggtgtctgcatccctgtccaagattgtggctgcacccataatggccgatacttgccggtgagtaggggcttggggtgggcagagagggtagaagagcttgagagagacccagagattctgtgctgacctcttcaaggctggggacagaggaggtaccgccatatcccagctatgtgacttgatgcaggcaacctccccctattagtctcctgcagcttctgtaaccaattaccgcagacatggtagcttaaacaggagaaattcattctcccacagttctgaaggccaaaagtcagaaatcaggaatactgggctgacatcaaggtgttggcaaggtggcactccctccagagaaatctaggggaggccatgcccagtggctcatacttgcagtcccagccctttgggaggccaaggcgggaggatcacttgagcccaggaattcaaaaccagcttgggcaacatacaattgtttttttaattagctgggcatggtggtgcacacctatagtcccagctactcaagaggctgaggtgggacaatggcgtgaccccaggagttggaggctgcagtgagctatgatcacgctgccgcactccagcctgggtgacagagcaagaccttacctctaaagaaaaaaggaaaagagccaggcacggtggctcacacctgtaatcccagcactttgggagactgaggcgggcggatcacgaggtcagaagttcaagaccagcctgaccaacatggtgaaaccctgtctctactaaaaatacaaaaattagccgggcatggtggtgcgtgcatgtaatcccagctactcaggaggctgaggcaggagaatcacttgaacccaggaggcggaggtggcagtgagccgagattgcgccactacactccagcctgggtgacagaccgagactccatgtcaaaaaaaaaaaaaaaagaaaagaaaagaaaagaaaaaagaaatctaggggaaaatctgtttgttgcctcttccagttgctggttgctgcaggttttccttggttgtggccacatcacaccaacctctgcctcctcttctgagtgtgtcataacacctccctctgcttctctcttataaggatacacgtgattgcatctaaggctcactcagataatccaggagaaattttccatcttcagatccttaattcaatcacatctgcaaacacacttttcccatataaggtgacatttactcattacagggattaggacctgatatcttggggcgggggcatcatttggcccctccttgaactgcattttcttcacctgtaaaatgggactaatcaccatctttgtaccataggtatctgaggatcaggcccgattatacaggaaagatacccactgagcactgggccttgccctgcatgttcatcacactcagtaaaaagaaagagcagtttacagcggggcgcagtggctcacacctgtaatcccagcactttaggaggccaaggcgggcggatcaaaaggtcaggagttcgagaccagcctggccaatatggtgaaaccccgtctctactaaaaatacaaaaattagctgggtgtggtggtggacacctgtagtcctagctactcgggaggctgaggaaggagaatcccgtgaacccgggaagtggaagttgcagcgagccgagattgtgccacagcactgtagcatgagcaacagaccgagactccatgtcaaaaagaaaaaaaaagaaatagcagtttacaacagtgcaaataggtagcccagctaataattgtttaataatatgaattaaattgaagaattgatttattcttgttaataatttttttgagctcttactatgcaccatgtttgttatgggtgttattatttatttatttatttattgagataggattgcactctgtctttcaggcaggagtgcggtggcatgatcacggcttactacagcctcaaactcctgggctcaagcgatctttctgtctcagcttcctgagtagctgggaccacaggctcacactgccatccctggctgactatttaatttttatgtagaaatgggatctcgctatgttgtccaggctggtctcaaactcctgggctcaagcaatcctcctgccttggcctcctaaagtgctgggattacagggatgagccacctctcccggccatgttctggatgttaattcatttaataatcacaacaatcctatgcaatagatactatgactattttccccattttacagatgaagaaattgtgacatagagaagtcagcccgaggctagccattaacatgcagcactaacttgcattgcttgcaaatggagccaaattttgctctttccttgaggtctcactgcctactggaagccatccttgatcccctaggctgggttaggtgcctcctctgaacccctcagctccctatgcttccccatctctgccctgacccctctgcctatgcccgaagtcttggatttgtgagtctggccttcatgggagaggtctggcctagagatgtggaaatcatcattgtagagatggcatttattttgttaattacatttcttcatttcttacctgtatcagttagcttttgctgggttacagatcactccaaaacgttgtggcttaaaacaattattcatttagtttgcaattttgtgactgcagtttaggctggacttggctgggtggttcttctgctatcctctgggcttactcatgtataatatctgtagtcagctggtgggtcagctgaaggctgcctggtctagggtggcctgagctggaagagttatctatgttccatggggtcactcatcttctagggagctagcccaggcttgttctcatggtggctgggcaggattctgtgtatgtgagagagagagaaggaaagagaagctgtgaggtctcttgaggtctaggcttaaacctgttacaacattgcttcttctgtgtttcattgacctaaatatagtcttacggccaacccagattcatagggagggggaaataaactctatttcttaatgggagtctgtaaagtcactctgcatggatacagagggttcaagcagtgtggccatttttgcgatccatcccaccaccataacctggcccctttctgtgcacaggtaaactcctccctgctgacctcagactgcagcgagcgctgttcctgttcctcaagctctggcctgacatgccaggcagctggctgcccaccaggccgtgtatgtgaggtcaaggctgaagcccggaactgctgggccacccgtggtctctgtgtcctgtctgtgggtgccaacctcaccacctttgatggggcccgtggtgccaccacctctcctggtgtctatgagctctcttcccgctgcccaggactacagaataccatcccctggtaccgtgtagttgccgaagtccagatctgccatggcaaaacggaggctgtgggccaggtccacatcttcttccaggatgggatggtgacgttgactccaaacaagggtgtgtgggtaagtttgtgagtagggggtagggaatgtctccctgggcttttgctcttctgattacagtgtccccacattcctggcttcctttctgtcttgcgatctgttttctttatccaggtctctgcggtttagtctctggatttgtatttatctcaatatttcaaacttggtccctctgttctggctgagttctagaggagcaaaaacatactcaagcaacttaatagttttgacattagtatgaatcgagactctatgggttgcaagtgacttaaaaccaaattcaaactgccttaagcaaaattgaatttattagtccatgtagctagaaaatcccaggatagagcctcaggaatggctggatctaggtgccctggcaatattatcagaaatttgtacttccgtctttgagacttgctatttgccaaatcagctttgttctcaaacaggctttccacttacaggtgtaaagacgacccccgcccagctgcccaggcctacaccccaccagcttatctaccttaacagaaaatggttcaataaaagacccaggattatatctcactgagccagtttgggtcacatgcccacccctggagccaatcactgtgactttagggaggaagttccgtgattggtcaaggctgggggtggggggtcacataatgtgtcagggtttcccataacctggttcagtgattcactaggactcacaggactcagcatatagttgtacttagggctaagatgtatcatagggaaaagatacgaagtgaaattgacacagggaaaaggtgcatcgcacaaagtccaggggaaatcatgtgcaagcttccgagagtcctttctcggtagagtcacacaggatgtgcttaattcctccagcaacaaagttgtgatgaaacatgaaatgtcatctgccagggaaattcatagagtctcagtgcctggggttttggtatccacctaccaaaattccagactcctagaaggaaactcccagaagatgctcagcatctttgttcatcactggactataagccgcaggtaggcagggatcctgtccatcttggtcaccagtttgttcccagtacccagatcagggcatggcacctagagggtactcagtaaaaggctggttttgtgaataaactcagccctgctccttttgtgccaggccatgtgctgggtaacagagatgactcggactcagtcgttatacttggaaagcttgcaccctactgagactttccatccactagtcttcatctgtccttcactacacccatcctcccttttcccctccttccttccagcatctattctacccccttctctttttcctatttccttccttctagtctttttcccttccttctttcttccatccacccacccatctgtccatccatccatccacccaccaatccacccatccacccatccatccctccatccatccacccacccacccacccacccatctgtcttttcagatctatctacctatctctccaatcatctggcagaggaaaactcagatacaaaagcatttagagggctgggcatggtggctcatgcctgtaatcccagcgctttgggaggccgaggcgggcagatcacttgaagtcaggagttagagaccagcctggccaacacggcaaaaccctgtcactactaaaaatacaaaaattagccgagcatggtggcacatgcctgtagtcccagctaaggcaggagaatcacttggacccgggaggcggaggttgcagtgaactgagatcgcgctattgcactccagcctgggcgacagagcaagactctatctcaaaaaaaaaactaaaaccaaaaccaaaaaacaaaacaacaacaacaacaacaaaaaacaaacaaacaaaagaaggatttacaaaaaaaaaaaaaaaaaagacaagtcttttaaggaagtttctctagggaatctaactttagaagggttaattcaccaactaacatagacaacagttatgtaaaggaaaaactcacaaagttactggatctgcagcctatgatgaagaaaaagtaattttctcacatgattattatatttgctaaagtcattacttatcttcagacatcagcattgcaaaaataaaggataacgttgttttggttagggaaccaataacttacaggatgtgctcaaagtttgttttattttgcaaactagaaccaggctgagggaggcagatcacctgaatccaggagttcaagaccagcctagacaacacagtgagaccctatctttagaaaaaaatacaaaaattagcctggtgtggtggcacacatctgtagtcctgtagtctcagctactcagaaggctgaggtgggaggattgattgagtctaggaggtcagggctgcagtgagctgtgattgcaccactgcactccagctgggatgacaaagcaaaaccctatcttaaaaaaaaaaaaaagaaaagaaaaagaaaactagaaccataaggatgaccctggggtttgattgtttgtctgtctgtttgcttatctgtctggtacaaaatgcttcccccaccgactttggggtgttgtgtagatccatgggtacgtctctccatccctccactctccatccttttatccgtctatccagatctctagctatcttctcatgtatccattgctccaaatagtgcaaacatccaggtcttcatctctttcagcacctgcctctttgatttagctccatgaacttatcttgtttggggtctccatcctccatcctggtaacacccagctattctggggctgtggcctcacctctgtgtttgctgggcatcccccaccaggtgaatggtctccgagtggatctcccagctgagaagttagcatctgtgtccgtgagtcgtacacctgatggctccctgctagtccgccagaaggcaggggtccaggtgtggcttggagccaatgggaaggtggctgtgattgtcagcaatgaccatgctgggaaactgtgtggggcctgtggaaactttgacggggaccagaccaatgattggcatgactcccaggagaagccagcgatggagaaatggagagcgcaggacttctccccatggtgagggatgtagtatggaaaccaggcttcttggggcaaaggcacctggatcctcatgggatgagggcagtcagggtgggtgtttagtctgcaagcggaggtgctaaatgtctgtgtcttgcagttatggctgatcagtcatccaccaggaacgaagatttcctgaagaagacctggtccctctggaggttgcagtggctgaaggatgcatcatgtgctcctaccctgctctaccgcttttctgggtcacagaggccaaatgtgagagcattgaataaatatcttaagct

SEQ ID NO: 111 - DNA, 21512 bp, Homo sapiens
cagctcttttctgtgttccctacacactcatattagacagggggttggtgatggggatgactgaatgaactaaggagtgaatgcatgactcacaaaaggtagaggaagattggtgctgtgggaggagtggagggagacattcatttggaaaatcagatggcaggagcctttttattgagtagtagaagagcaaagcagaaggaccagaatctggagtcaaaagacatggttgagttctcattctgcaacttcctagctgcaggtctttgggaaaatgactcctttatacataactctgacctcatctataaagtaaacctttcctccttaggagattgagcttcaaactgtcacctctttgaggctcctgtccctttactacaacactaatttcatcccacttggaaattgtgtagagctgtacaagtaaaagggtggacaataaacaggagaaatatagtaggttccacatactctaacgcccagcccttggcctatgtgccaacactcactcccaactccttgaaaagctactattaaaagagtttccctttggtttagaaagatgtttcttataatgcatagcacattaaaataataacaactaacaccacagagaggagtgtggaacacccagtgagagtaatacagataaggagccagggtctaaaacaagacacatagggttaccttgggatgtgatacaacaaggaacatcataacctcctgcttaggtagctgggcagaatcaaggctgccacagagcctgatggagtaggaggaacaatgcccagccattcccacacatgctcaggagcagggcagctatgtacatgttggagagatgctgtttgtctttgactcgcccgtgttctgagtgagccctttgacccagttttagaagcagactgagccacggtgagcagaggcggggcttagggaggcaggagtcttggggctttataaagtcctgccgggcaccactgggcatctctttcaaggtttctgctgggtttctgaactgctgggtttctgcttgctcctctggagatgcagcgtctgttgactccagtgaagcgcattctgcaactgacaagagcggtgcaggaaacctccctcacacctgctcgcctgctcccagtagcccaccaaaggtgagtcactttctgagaagcaccttgtaactagtaaaagatagtttttccctgctattggggaaaactcactagaatcccactcaaaatttggcaaggcttgtgcacagcagccttagacaagcaagttaactttaaagggtctcagttacctcatctctaaacagacaatccctttcagctgtagagtgagaagagcccaaacctctgacacatgctgtgtttgtgagcaatggcaacttttactctgccagctgcatgaagcagtagaaatatcagtaccaggccacagctttcctctctacaccaccattcccaccttcacccctagcctctgcctagaaccacaggaccttgtgccaactgcagtgttagtaaaaccagtgactttatatcactgcagcagaatcagaaatggactgaggatgagaagctgtgtttgccttgtgttccaattttatgaaaaggggaaatgtgtgtttatgtgtgtatgtgtacatgctctttgcaagaagaacatgcacactccttttctttgtaaatagtccctgaacatggctcaagtgcttatgttttccattgtcagcgatgatggtaacacagctatcgttagtgcctcaggctcccagccacctatgtgtttctgtctaatccccaaaccatccactacacattgggactagttctttatttccttacatttttactctatattctatgactactaaatatttagaaaaatgattttgacctagtgtctttccttgccaaatacccaaggaacctgggtgtatagatgtgcatggtagaggcaaatgcacatagctttcttatatttttcattatgctaccatcatctcactctccccatgcactgccaaaccctgcatgtgggttaaatgtcccagctcaggatttaacctgtttctatatttgtgaagaagagattgatgtgggtttcttgttttaatagcaatagttggccatcagccaaaagacatacatcaatcctccccaacattctgactcccttggttcaaactcttggaatcattcccatttcccttctggtatattcacagttaatcccattatgcatggcttgaactaatattgcttttcatgagtcaccttttctctatatgtctaatcgcctttaatccaacccacattggctctaactccaacctaaaagagactttcatctcagcatctgctttgctgtcttcaaaattcggtaagacttgtgccctccacttactgtatttctcacatattgtctccctgctcccctatacacctgcatctccagggttccttacttgttcagtcaccccctgccgtggccactgccccttcattcccctccagttcttcactggcagaagtctgtcatccatcaaggtttgcctcaaatgcggtctcttccacgaagcttctctgatcctccaacccactgaaatctctgcttcctttgaactcctgtagattttgctcacattcctttttgtgggcctgaccacattctgccttgaagttgggttatatgtgtgcttatcattcctcacactggtcaaggaggtctcaagaacctcaccctcttcttttctttgtccaacccctttgttcaaccctcacaaacccttcccagcacagtgcctgaagtgtagtaattaattttgaaacacaagggaaggaggcaagatggaatacagaagtaaaggtgtggtgcatgttcttgaagtgggcaacaccaggagaaaaatgatttaaaattacacaaagtgatcattctttagagaaagcacaagatgagaaggatactcttaacttcggtgggctgaagcttctggaagcctctccgtgttaattttcttcaaggctttataatccatttctagaaatagctccccaccaagacagctacaaaagttaccaactgacccattctaagcttcttcttgcaagctttgatttctaactgggaagaaagggagggagccagcccagagaagtcagagcgagaatgaggctgagagaaaggcagccaagctggcaggacaagcgctggcttaaccattagctcccgggtactggggaagctcctccgtaaatatttgagagtacaaactccagttatttggagggagtcaaataaatagggaagataaataaactccaaacctctcctgtcagatataatgtgtatttatcattctgcctcactatcttgtgatcatatgatccacttttgcctcacagctgtccttagaagtgaccttgctgctgggagaggctctagaattctaccagaggctcagaatcccaaagatgattgatagacacattcaatctgagttccagctcccgtagaatggagctaaatttataagcctggcacccagggcagtgaagggacagagtatttctaacacgtgagaaactatgaagttaccctgagtgcatcactttaccagtgtgtgccttggtttcactaactataaaatgaagaatgttgctaaagtgaacagaaggtataaagtacttttgtatgggagcagtacagagatcaccaagttcacctccagtatgctcccatacaaaagggaacacagattttcgccagggatattaagaatctgggttaaagagaagtgaattggtccagaaaagaaatagatcatctctcccttcttctgctgactccttccccttccttttttcctctgctctcgtttagaattgctctttctgctgtctgtgttccctgcatatttagctgtaaaatgtctgcttctttcactgggctgtgctctctttatgggcacaatgcatgtcttattcactgctgtgtatttggactagaactgtgttgggtgtgctcaataaacattggaaggccctatcagaaaaatcagctagcagaaaacttacttaaaagtaggaaaacagtgggtatgttcttgtgtagaaaaaagaaaggagaaagacatgtaattagaggtacacttttaaaatgagtaaagattgtataattatgccctataagggcttataacatgtagaagtaaagtatatgacaataatggttcaaaaggatgcagagagtaaataaagtcaacctaaagtttttgcagtgttccaaaagtaagataagtattaatttaagtaagattacaacaagccaattatgcatgttataatctttaaggtcaccagtaaaaggaaaagagggtataaaatgaataataaatatttgcttactctaaaaggatatgggaaaggaggaataaaagaacaaagaacaaatgagacaaatagaaacaaataaaaaaatagacttagttccggctgggcgtggtggctcacgcctgtaatcccagcactttggaagaccgagatcaggagatcgagaccatcctggctaacacggtgaaaccctgtctctactaaaaatacaaaaaattagctgggcgtggtggcaggtgcctgtagtcccagctactcaggaggctgaggcaggagaatggtgtgaacccaggaggcggagcttgcagtgagcagagatcacgccactgcactccagcttgggtgacagagtgagactccgggtgacagagtgagactccgtctcaaaaaagagaaaaaaaaagatttagttccaactatattagtaattacaacaaatataaatggatgaaatactcaaattaaaacaccactattgttagacttattaaaatttttttaaaggactaaaatatatataccgatcacaagagatgtatgttaaagataaagacgttaagaagttgaaagtaaaaagggacagaaaaagatgtaccatggaaacagtaagcaaaaagctagtgtagctatatcgacgtcaggaaaggaaactttatgccaagaatatcacaaagatgaaaagggatatttaataagtatagaagggtcaattcaatgaaaagataataacaatactaaatttgtagtcatctgataacatagcttcaaaatatagaaaattaattaaatgattgctatgttactgtcttttgaggaaattgtctacagaccattagtgggagtttgactgttatctccatcacaggttttctacagcctctgctgtccccctggccaaaacagatacttggccaaaggacgtgggcatcctggccctggaggtctacttcccagcccaatatgtggaccaaactgacctggagaagtataacaatgtggaagcaggaaagtatacagtgggcttgggccagacccgtatgggcttctgctcagtccaagaggacatcaactccctgtgcctgacggtggtgcaacggctgatggagcgcatacagctcccatgggactctgtgggcaggctggaagtaggcactgagaccatcattgacaagtccaaagctgtcaaaacagtgctcatggaactcttccaggattcaggcaatactgatattgagggcatagataccaccaatgcctgctacggtggtactgcctccctcttcaatgctgccaactggatggagtccagttcctgggatggtatgtacggccacgaaccttatgtaagaaaggtgctggaattggaggctgaatattaccagttttgcttttcagttccccaggtggcttcatctagtgaaggaaggacaatatattcacacagctgctgctatcatcccacaataaccacttagacttatatagctttacagttaggtagcatgttcacatagccattcatttaattcttacaacagcctaggaagtgtgtattataccagatttatagaagagaacatggaagatctgatagcttacacatagtgagtggcagaggcaaaaatgccaaaccacatctgacatatttcctattttaccgtacctgtttctcttaaacatgtcctaagtctctgagagattggtgatgttgaaagatgtatgcaagtttagatgttcgggaaaaaaacaccttcatagaaacaggcccagaaaaccacaagatagactgtgagtatttctactctttctcccttaggtggctccttgcatattgctttttgcttaacatattaacattaccttgtatcttacttatatcttctcccagtgctatatttgaggactaacccctgttgttacagcaagaaatgattcaagggaaacagtacagtatgagagcttgaagccatagctctatcaataatcattgataaattcctgaacctctttgagcctcagggttatttgcctatctgccttgcttaacttataagaggactgaataaaataattcatagaaatgtgaaattttcataaagatgtgaaaaaacagtatgttggcagtagttaagacactctatatttactaagtttgaaactaggattaaaaaccttagaaaccatgataagcattaattataaaattaatcaaaaagccttaatattggcagagtcctcagagatcatctaattcaatatcttttgctttagaaaaaagaggtcaagaggagtgtaacagtttatctctgtacatgcagcaagaccgtgcaattacaaaagttcattccaggcttttccaactgccctacctggctccatcattaacaattccactgacatgggatggtccagtctacatcatcaagtctgttcttaaagtgcctctcctacttgatacttgtattactacctctctagtaacccctaccaccattaccaccactgatatgtccaaccaattatttagttgaggagtagaaatgaaaaataaggggcattcaccagcctttaaccaaaaatcaaagagcctattcttgagagcattgtcagccttaagcatgccatttcaaatgcgtagattcttctgaggggctgggtattccacagatggggttgcaaatgcatcttttaaaaaaatgtggtatctaggtataaaagtaaaaatttaaaaaacaagttattgaaatgtgaatctttagtttgtatttaaaacaaaaacagctaagcttgagcctggacactcggactacataccctgcaggtgacagtaaccaccaggaccagaggatgccagtgtgaatgagaactctgcttctgacctagccagtcattcatctggggaccctcaggtgggagggagtggctctgagactcagggagttctgaatcactccagagaaaagtggaggggatgaggaaagagaagagtatttctggctcagattggctgggagtccccatgttttcttgtgtttttttttttaaatgaaaataattaaaatttatatttggaaaaaaacatacacatacacaaaagtatataaagcaaagaaagactcctcatttgacctgttaccacttcccaaaatttaacactgatggtttatatgtattcttccaatattttttctaagtacctgcaagtatacacatatctattccattttaaacattgtacaaaatattcctcatctcttaggtcttagaggtaattctgtatcaacatatgtaaggtctatctgattctttttaaaaccacaatattcttgatggatatgccaaattttatttaattaatcccatattgatggatatttagttttttagcaatgataaataaagttttaatgaacattgtacaatagctttgtatacttttggcattgtattgtaagaataaattcctagaagtggaatatcaggataggttgatttaaaagtttgataaaatgtgccaaattcttctccaaaatgttgtactaacttacattcctacaatgtatatattatcaaactttctaatctttgtcaatttaacaagtaaaattataatgtttttgatttgcgtttcttttactataagaaatcttgaatatttctatgttgtttattggcctttttttattatatagcttgcctttttttattttttatttatttatttttttagacagagtctcgatctgttgccaggctggagtgcagtggcggtgatctcagctcactgcaacctctgcctcccaggttcaagcgattcttctgtctcagcctcccgagtagctgggactacaggaccccaccaccacacccggctcattttttgtatttttagtagagatgggatttcaccgtgttagccaggatagtcttgatctcctgacctcacaatcctcctgcctcggcctccccaatcgctgggattacaggcgtgagccaccgtgcccggcctagcttgcctttttaatgaaacttttataaatgaagataaattgatttttgttgattgtaagtattgtaaatactcccccaatttgtcttttgactttgtttctgatagaaggctttgatttttagataatcaaatttactggccttttcctaaatggattctaaatacttttctatagtttctaaagttttcaaaatgtgtgcgtgtgtgtgcttatatacaggtagaaaaaagtattgttttcccttaattttatgtatataaaaattatatatacttaaatatatatttatatatattaaatataccaatttacttatactaatatatttatatatactaaatatatacttacatttatatatttatataaattatttgtatatttatatatatacacacacacacatgcacatagcattggggaagaaaacaatactttttcgttgatgttggagttgggattgttataattcttaagagaaggtccctggatttcagtgaatttgggttggagtcctgactctgaatccttaccctaccatttattagctatgtggtttttgggcaagtggcttaaattctttagccctcagtttcttcatctgtaggatggggataactatatctgctacatagatttatcatgaggattaaattatatagaaatgtggctcccaaagcagtgctgtgggtgaatactgggagcttcctcacaggtcagaatactaaaattactaccatatctcacccacaaacttgagtttttgggacagtacttcttacagatgaaagtggaacacataatagtcaagaccacaattatttattgaatactagtctgattatcataaagttagtgactacggatcatttactcaatataaactattttcacaatgaaagtagtgccacacaattcaaggcacgtggttcaggatccagtcagaactgggtttgaatatcaaaatccatattaactagctatgtgaccttacactagttactcagtctctcaggaaggcaatgtcttcacttgtgaatgtggatgttacctacctcattggattgtttcaagaattgtttaaggttaactagtgtcctactagtgttttaaatgttagtttccctccctgtcctttaccttctatgatttaggatataatttcaggatcatggtgtgctataaggagatgggtacaaacccaaacctgaattgtctccaaaagtgcgaattaacacatttttcactgaagtcagagacagaattctgaataaatgagcgttttacagagtgtcaggacactaaattttgactttacatttcaaatgtatcatgaattgcactagaacataagctccacaggactgggattttttattttgtttatcactctatatccaggacctagaattgtgcctggtacacagtaggcactcagtctactctagatttggtaatgatggtaaatatttcttgtttctctttacaggtcgttatgccatggtggtctgtggagacattgccgtctatcccagtggtaatgctcgtcccacaggtggggccggagctgtggctatgctgattgggcccaaggcccctctggccctggagcgaggtttgtagtaatccattaccaagaggctgtgcatggcatagccaagaacatagatcctaatcccacattggcacacctgctactcagggctgaggtatgcgtttgaggatggtattgcttgcctctaaaaagggctggtctatggagcagagggaggagaggagaaatgggagaggggaatccgcgaggcttcctctcttgcatcatcaggcattgggataacgatgcatggaatgagtggtgcagatgatggtgaggaatcttagggaactcttctggcaattgaagattaaaatatataactggatataaagtgaaagtctttcctttgagactgttggcttctattctaggttttgttaagcccatgtaggtgaggaaagggaaatatacatctcatttttgtaataccaacaacctgtccaactccttttgaatatgcaagggatgttgaatgggcttgaacttgggcatgggacacagataatgaccagaaacctcctttatatggttctctcatcttttgtgctcaaggtaggctgcattgtgtagtctctgaaacactttgtgtgcctttccagggctgaggggaacccatatggagaatgtgtatgacttctacaaaccaaatttggcctcggagtacccaatagtggatgggaagctttccatccagtgctacttgcgggccttggatcgatgttacacatcataccgtaaaaaaatccagaatcagtggaagcaaggtatgagattcagagggcagaaagtgggggctctatttacataggccaagggtttgtacccaaaggccatgagatggtcttttctctcctgccttgaaaataatgtcaagagaattgtttcctgtcctctttcttacactcttccctgggtctatgctaaaatccatttggaagtcattcaacttcaggtgtaaaattgcttctaacttgagctaaataaaagaaagtaaataatccagggcaaggcccccagtgtgaaaccaagggatgtcagccacctgagaagatggtgttaagaggctgggcagtcacattcgacagtggttggcatttgtttctggttaagtcaggcatggtttggctcttggtttgtggtttaccatcttttaaagtctcacgttgagaaatcatacctatattttctatatgctgaagtgttatcagtgatttttctcttcgtgatgctactgcaggttgattttattttcacctttagttttggaatttccctcctgagaaatatgtactgctttcataagcagaaaataagcaaataaatcttccttttaaaatacagaaaagcagggagtggtggctcacgcctgtaatcccagcaccttgggaagctgaggcaggaggattgcttgaacccaggaatttgagaccaatgtgggcaacaaagcaagaccctgtctctaaaaaaaaaaagtacaaaagttagccaggcatggtggcataagcctgtagtcccagctactcagaaggctgagatgggggaaattgcttgagaccaggagcccatgcagtaagctatgatcaagcaactgcctccagcctggactacagagtgaaacaaaccctgtctctaaaaacatataaataaataaaaataaaatacagttaaacctactttaaagacataaatagtattcttgcctgctcaggcatgcccagatgggcatccgcaaaagacagattgcagtgtgggagaaggcatggatgccttgggggtgtcataaagagctacctcttgtccctttctactgcagtgggtgggacaccacctgccagaggtgaacctcatgggcaagaagttgctttgggcctctctgcctcagtctgtcttctgtaattggttatttgctcctaactcctctgaattcttgtggcatttaaattttactccttatttgcatatgtaaggtgacagatgctgctttggatcccagcactaaaatgtaatatttcctaagggcagagattgcattgccctcttcttcagagtgagagagacagtctgtagagtagagtcagagacatctgaacctgaatccaaagccagccttttcaaagttggacagatgacaatgttttgtagaccggttcctcctctggcaaatgaagaaaattatataacacaaggttgatttgagccaagtatcatagaggctggtaatagtagatacaaaggctttgtttctttcccttctttccttattcgtagagattgcttagtaagtgcatgtaaaatgaataaataaagctcatatgtgtttgcaggaggtgggaagtagttccctgggaggcctggagaaactcggcacagttaaatctcagggaggatatctaaatggctcgcccctcatgccccatccttgccttcacgcttcctcttccagctggcagcgatcgacccttcacccttgacgatttacagtacatgatctttcatacacccttttgcaagatggtccagaagtctctggctcgcctgatgttcaatgacttcctgtcagccagcagtgacacacaaaccagcttatataaggggctggaggctttcgggtgagttctcttcttggggagcctagaggctggtgaggtgtgagcaagaaggaggcttcttcatgccttaagtctagaccaccagcacccctgtgggggacaaatggcaatcctccagcagaacaggaacaatcccaggtccttccacggggtagtgggttattgtctgggtagggccctccatgagttattgcagggaaacatgggggatttggcagcactgcaggatcaaggggcagtaagaaactacagaggataaagaaagaaagagagaaagggagaaagagaggaagggagaaagagagtagctaaatcattcagtcaataaacattttctgaacatgttatgtgctagacatcgtattaacctctcaggatactaaaatgaatgtgactccatggtccctgccctagagcatctcacagcctatacagacacaaacacacagaagcaaatgatcacactacagggtagcaatttgagaagtgtcaggtcccattctcatttgccattgtcttaattcatgtcctgcttttgcttttctcccatctataaaatggggatgttccagctcatccccttagatgtgaaaaagcagaaagaatgctgtttattgattcactacactaatacactaatatttacaaagaaatgtcttcaatacagtttccactgggaaaggaatctttccctttcttcttggtacctgtttatttcaaattttggtcaattttatcaacagtagaataggctaccaagtgtagcccctgttactaactagtactcctaaccctgccactaactaaaacatcaaaattagcacaaacactgcttgtaagaccagccctatcgaaacaaaaagtataacatataccaaagatactagcttaatatctttaatatataaagatattatcaataataaaataaataccctaatagaaaaatgagcaaaggatatgaacagaaaattttctcaaagaagacatgtatatgatcacattttaaatatgcatattcattaataaaaagtttactcaagttaccattttctctagatagtctttttaaaatgtgaatacccagaattgtcaagcctgtgggaaaatgggcagtagtggatgcgtaaatggatcaggtgttttgaggagtaacaggagagcatgaagccaaagccttaaagatgtgcaaactttgggctcagtaatcccatgtgtttaaaagaacacctacctattcgctgtagtgttttaactagtgaggaacaggagcaggaagatgggttaaagtgcggtacatcctgtcatggaccattcttcagcctttacaaataatgttatagaatgtcatggaaaaaaaatatatatatatatacacacacacactaagttaagaaagtatgctaaccacaacacatagcatgattttctttctaattttctagtaagctctataaaattagggatggattccaccagaaaaataagccctaagtactctctctgaatggtaaggccattagtggtatgttctcctctgtactgttctgtatttccaaatattgtaggaaaaacatgcgccccaaagtcctctccagaagctgttacttttcccccttgctccctgcctcccgtcccctggcctctcacatggctacctctggctacctcacagggggctaaagctggaagacacctacaccaacaaggacctggataaagcacttctaaaggcctctcaggacatgttcgacaagaaaaccaaggcttccctttacctctccactcacaatgggaacatgtacacctcatccctgtacgggtgcctggcctcgcttctgtcccagtgagtactgcatctggctccatgtcctccatgcacaccctcagcctccgcccccgtgggctgcagggtcaacaaagttgggtttctcttttggctcagaaatttaaaagaaaggaaggggcctggtgtagtggctcatgcctgtaatctcagcatttggggaggtttaggcgggcagatcgcctgaacctaggagttcgagacccgcctgggcaacgtggtgaaacctcatctctacaaaaattagctgagcatggttgtgtgcacgtgtggtcccagctgctcgggaggctgaagtgggaggatggtgtgagcccaggagtggaaggttgcagtgagccatgattgtgtcattggactccaacctggatgacagaatgagatcctgtcataaataaataaataaatataaaagaaaggaaaggagggagaaggcaggaaaaggaaggaagatgaaagaaactcgtaccaaaggtgtatgtataggcagatttacagtctgtatcagacagtggtctccaaagtgaagtacatgatgtcaagggatgggcaagatctgtttgggcacatcaagaaaacagtagctttggtatgcatatttttgtctcatttatttaaaatctctatacttagtagagcatggtggttaaatgggtctgactttagagcccacaacctgggttcaaatttttttaaccaattattagggttgactttggataatacttaacctcaatgcacctcaccttccccaactgtagcatgtgtgcaatcacaatacctgtgttctactgtttttatgagcattaagtatctaaaacaattaaaatagcagtgcttagcaggtgctcaaatgttggatgttatttctattcattttctgttttgtgggttttataaggaagtactgcatctaacataagaaagggctcatgaagtggctcatgcctataatcctagcactttggaaggctcaggcaggaggatctcttgagctcaggagtttgagaccagccttgggaacagagggaggccccatctctacaaaatttttttaaacaattagccatggatgttcacggtggctcatgcctgtaataccaacactttgggaggccaaggtgggaagatcacctgaggtcaggagtttgagaacagcctggccaacatggcaaaaccccttctctactaaaaatacaaacatcagctgggcatggtggtacgtgcctgtagtcccagcaactcgagaggctgaggcatgagaattgcttgaacccgggaggcagaagttgcagtgagctgagatcgagctactgcactatagcttgggtgacagagtgagactctgtctcaaaaaaaaaaaaaaaattagctgggtgtggcagcttgcacctgtagtcccagctactcaggatcctgaatcctgaggtgggaggatcacttgagcccaggaggtaaaggctgcagtgagccatgatcacgccactgcattccgggcactccaggctgggcaacagagcaagactctgccaaaaaaagaaaaaaaaaacgggcaggaaaaagtgcttatgggtgaacttgatcaaattattactcacaggggatgatcaaaaagttatgactgctgaaccattaccaatcaacatgggagcctgaagggtgagtccagtggtctgatctccatctggagacaccttcagaatgcactgaatttaccctgtcctcatgagaggggagaagctctatgtacaccaaaaattatcttgtgttttctctgccttatatatcttggatattagctgctttccttttggcaaggtttcctacacaaaggcctgtccctggggtctaccagaagtccctctttatgtagggtgcctggaacccatttctagttgcatgaggtagacagggagaagatcgggatgataggctgttgttctatttgaagtgcagaatataatatatatatacatatatgtgtgtgtgtgtgtgtgtgtgtgtgtgtgtgtgtgttttatttgatttctttccccacagccactctgcccaagaactggctggctccaggattggtgccttctcttatggctctggtttagcagcaagtttcttttcatttcgagtatcccaggatgctgctccaggtgagtgtcatctttctagtaggccttcctgacaagattcatctggtagaataaccatcttcttccccaccattactgaggctgccatcttgacagagttacgttattattaatagcaaagtaaatcactgaagggatttaagcatggagtaagtttgtttaatttatgtgtttaaagcacttatttggctactacttagagactagattgaaaaggaacaaagctggatatggggaaaccacttagattgttccagtaactagttcaggcaagaggtaatggtggtttgattgcaactgattaaagagaagttgatggatttgagatacctaataagaatttattgattattttgtgattgatgtgattaaggacatgcatttaagtactatgtggcatacaccttgaccaaatcagtgtgtctgcctgcatgttttgctaacaagtatgcttgcttatcatttcttggtattctaagccacacacaccacacgttcctccagggtgtaacctcccacagaacctggctctctgttgaactcgtgattggcaatagtgataatgacaatgaaaaaggtgtaacaatcttgcttttgcttcccaggctctcccctggacaagttggtgtccagcacatcagacctgccaaaacgcctagcctcccgaaagtgtgtgtctcctgaggagttcacagaaataatgaaccaaagagagcaattctaccataagggtaagaaaaaagtcaggaagagaggaagagagaccccattccagtagctgggagccagggatttctttggaaatctagaatttagtagtccagggtcaagacttttacgagatatggttgggagaagatttgctagaagatctgttgtccaaaggggcaagaagtgggtggggaaacagaagatagagttgggaagagggaggcaggatgcagcttcccagtatagaatatagctaaacacccagaatgtgtagtcccatggaagccagaagtatagtctttgaaaataccatctgcaacagttgaaagagtacagactttagagctagatatccaaatctaaccctgagctgtgccactcactagctgtttatctttggaaaaatggttgaacttttctcagttgtcttatttctaaaatcataccgattttgcaggatttccaaacaaattaaatgaattactctatataaatatgttatcgacaaatattactgtcccctccaaattgccctctttctccaccaaacataaaaacaaaaaacaaaatattgctccaaaagcaacaaatgaaaggaaaatgaaacccaaaggtaatactagagtgattagttggtggttttaaaaccatagtaatacacagttttaccatgatttctacaggttttatatatattctcaagcaaaacttgggatgcatgttgttttgcagcatggtctcaaaaggagacagaatatacggaattggaaatgttccagaaaacctagacctagtggtcattgatctcttctggaccagtggatatgttatagcaaagaaagacaatgaaaataaaaatggagcagggcacagtggctcacgcctgtaatgctagtcctttgggaggcagaggcaggtggatcacttgaggccaggagtttgagaccagcctggccaacatggtgaaaacccatctctactaaaaatataaaaattataaaaatatgaatataataaaaaaaataaaattatgtaaaaattagccgagtgtggtggcacacacctctaatctcagctactcaggaggctgaggagaattacttgaacccaggaggcagaggatgcagtgaactgagatcacaccaccacactctagcctgggtgacacagaaagactctgtctcaaaacaaaaaaaaaaaaaagaagaaaagaaaaataggacctctgagacaaacgttaacggacaaagcactgaaatactgcaatgaatcagaaccagaaaatttagagtttagaaggacgtgtctgttaggaaacaggaagctgggaattacgtctcaaagtaggaactattggcaaaaggatgggatgaagatttcaatggaggaaggctatgtttactgtaggaaaatgttgtactcttataataaaagtcttaatagacttttattaaggccttaagtgctagattcaagatggctgcccctcttgttctgtgggtccagtgttctatttggtggactaagggtgaccttgcagccccttacagcccagccaagagagcttcactgtgaaggggcagacatcttcattactattttctcttccaaaaactcatataactctttgtgagtactgcctcttctcctcattccacagtgaatttctccccacctggtgacacaaacagccttttcccaggtacttggtacctggagcgagtggacgagcagcatcgccgaaagtatgcccggcgtcccgtctaaaggtggtgagtgagagtttgcagagttggtggcataaaaccctaatgtcttcctctgagtaacaacacagagagagaaggtggggacaggtgcagggagaagaaagtttaatggaagaggattggggtgacaggagaaatgggagaattatctgtggaatttttaaaaggaaaagcaagtattcagaataggaatcttgtagtttgggaacattaaccaggccagggagggttcacagctttcaaactaatcagaagtggggatttgtaccataaagaccaattaaaactcttggggctctttgccttggaaaggcaaaagctgggggagaaacatgttctgaaatcttgaatgtgaaaaataggagctggatttgtttacctgatctgctgaagataggaagctctcctagaagcttgacagattagcattcagagcatccgttgagtgaacaggctgtgaacctgaacctatagaaatcattactccagggggatgagatcaacagatctgatgagcaacagaacaaccaagatgaacagccccaaaacctcagaaatggtacacaccaatgtgtgggagacagattcataaggaatggggcggttgaagattctgttaaagccagatacttctgctggagggagttttaggctaagggtcatgtaacaattcttatatcatgggattccttctggggagaagcaatgaggttcaggaaattcgtggacacaaggatagggagaagagagcaaggtgaaagaggattgcggtgacaggagaaatgggagatattctttatgatcgtttttaaaggaaagcaaacattcaaaaataagaatcttatatgaacccaggtagctgccttcagttgaccaaataggtaggataagcagaatgatagagtgagaagagatttattttacaacccataaattttaattagtgcagtctccatgctcaagtttttaagattttcccctccttttggtagatggagagggaagaagaaaaaggtgtgccgaggcagggaaggagcagaggaagggaaggaagaagtcagtgggtggcagagatgcacagatacagccacctgagaggaagcagaggtgcgggtggaggggccctgggttcattccttaccgctgggatattggcaggtgctaggctgttgcagcccagatgttgttagggctaggagaggtggacaagtgggctgagggccgcaggatgcctttgagaggacgagctcagttagcagccctgaagactgtggtactgcccgggagcctgtgtgcatgttggaaatacggttcttaagggcaggtcagtagcaaagaggggctgttaaatgtgtcaacttagttcattcatcagaagaagagtgggagaaatagggagggaggggggaaagggagagagagaggttggggagagagtcagcgggagggggagagagaaagagaaatttggaatttttaaaggagaatttccacgtcagcctccctccctctcatggtagacaagcttcttgcaagtgcttaggcagaattatacctgaaaaaaaaagctggaactcttgaccttttctcatgttgattattaatatgagcagtgaacttccaacaatgagattttagcagaaatgaagggctgctgtcagtgcagtgctcatggtggagctctacaggtctctgcagcgccctagcctgcctctcctgctctcctatcacaggcagatgtgcgacggggaccctgcctacccccagccttggctccagtagcattgggcacagatccctcaggtgtccaggcttggcacagggtgcatagtgggagcaccctcaggatgcagttaggggagcccctctgcacagccacacctcgggcaagaagcaggtactgggggcagggtgcccaagaggagacccatgattgaatgactttttgtttatttaagttctgcagatccatggaaagcttcctgggaaacgtatgctagcagagcttctccccgtgaatcatatttttaagatcccactcttagctggtaaatgaatttgaatcgacatagtagccccataagcatcagccctgtagagtgaggagccatctctagcgggcccttcattcctctccatgctgcaatcactgtcctgggcttatggtgctatggactaggggtcctttgtgaaagagcaagatggagcaatggagagaagacctcttcctgaatcactggactccagaaatgtgcatgcagatcagctgttgccttcaagatccagataaactttcctgtcatgtgttagaactttattattattaatattgttaaacttctgtgctgttcctgtgaatctccaaattttgtaccttgttctaagctaatatatagcaattaaaaagagagaaagag

SEQ ID NO: 112 - DNA, 25049 bp, Homo sapiens
gaagtcgcttgtgctaagtgacatataatcaaactgaactttgaaatggaccagttttccaaaaaacaggagatttcagtcaacctcagtcagtgtagtaaggaagtcctctctgttttagtcctataaggaaagtaactttgaaacaaccaatctatctttttttctctgtttccgctttcttcatactcaccaggacactcattctattttatagaatgatgtgttgcttgattctagaattgcaaataaaaggcaattacatcttctaaactaaatttgttgtaattttgtcttttgatagtttaaactatgggatcagaaattcaaagactatgaataaaaatttcaaaagaaagaaatagtaataccaccaataagaagaataattaaaaaggtacaaagaaattggatgcaacattgtaaaaagagccatagtttggagctgagctgacatgagctaaaatcctaggtgagtaacttgttagctatgtggcctctgaaagtcagctcaagaatctgagcttgtttcctcacctctaaaattgaaaaaataaggcctaactatcaaagtcattaacaagtcattgataatgcttggcctattttaatgttcagtatctgtaagttgataccattaaaggatgcttgagatgccaactactatataatctgaaacaataatgatcttttttttccccacaaagataacaaaaaacaaacacaaaaaaacaacagtaagctctgccagacatgtaaaaccaatcaaactatataatgaattaaatcctttccccattaaaaagacgtatcagtgtacctaacacaatataggaaaagaaacacaccttatttggcaagagatatattcattctccagataagagaaacacacattgaaaccacttctgctggattactctggccaataagagcgtctgaaactgttctatgtactatgccctgcgatagaaacacagttacctctcccctttcacgtagttttcatttgtggtgagattctctcccaggccacaagacatttcctgctcggaaccttgtttactaattgtaagtactttacaagtaagaacttgttttaaaaacttagcattcaaaaaaaaaaagctttctttaaaagttatttgattttcttgtttttttcttagcatgttatattttgagtttcagctaaaagactaaggttttcttatctaattgctttaaatttatacatttagtcaaattcaacaatttcttgctaagcattttgccaaatgccaggcttttcaaagtagtgtaagatcccagccttgaatcctcatcaattgctgctttctgcagcaaacacatattatacattgtatttagtaacatgatcattaatttcactctttatttcaatatgtatgcatgttgacttatgccggtctaatttctttctgctttacaaatattctattttatccattcaaagtatttagaaacaagatatggaattttgtagatttagctaatgaattataagaattcttgaattctcactatgaaagtaagaaaaacagactagaattcttcaaaattaaattctggtgcttcatttatatgtataaagagagatggagagattatgaaatggaaatgtttcaatcaaagcaaaaaaatgaaatttaacatcaataaacagtagaagagaaaaatctcaataatatgtctagtatctggattaatcaatattaataatatgtattaatattactataattaatatcatgtattatattaatattaatgtattttattaagatagtgggctgtcctcaggagtgaagtgctcatagaaaggagagacaaatacaagattgattcttaactaatagataaaattaaggtgtttaaaatatgagccaaatactgcaagatttcctgacattgagaccattccacagaacttcctaaagaaaggtattctagtctcattctccaaagcttgcccaccaagattcccatttcactacctcctgcccccatttttcctgcattttccaaggtggcccctgccaacttttttttaatcactctctctgctcctgtggggttaaagatggcatggaacaaaacagctgtgtggtcacaccacaacgggcagaactgctggccacagataggaaacctcaggcatctccttagcccttaccaaatccagcccaacacgtttacacaccctggcactcaataaaatatttgctgaattaaattggatctgtagttattagtaacagaagaaaaataaggccactggtcgtgggttacaaaatgtgctctgcaaggccactggcattagaatcttgtgaagtgcccaggatactgcacaggcccgcacctgaagggagaggagctagtttggaatgtgctcccgggaatgcgagagggtctagcatgggcttcatcgcatggaggaaggtgtaccgtttttcgaattctcaccgaagcagctacgtgctcaccaagccgtgtctgtgagaagggccacgtttttctagttcataggacaaaagcctatggcataagggcagcagccctgcgggtgcacgttacagacttttagaccctagctcattctatctaaaccacaatctctgaacagtgtgtagaattctacattgtacagattcctcaaccctagctcattctatctaagtcacaatctctgagcagtgtctagaaatctacacgttaaagagcagtccaagtggttttactaatagtaagctttgaggaccactgaactaaggagacaagctggtacctaaggtcctaggaactctagattttcaaggacgttttctctccacttattgctgaccttttaccttgaatggctaaggctaaagacttcatggctgaagcaaagagaattgtggttgtttgaacaagcaacaattttacatttgtttctgttttacatttgttgcaacttaaaagataccttgaatttttaaatgatcacagaggcgcgtacaaatgagtgtgtttgctttctcatctgttttataactttcaagaaggtatttctttgaataagatatctcacgggagaagttattagaccctttttagaatcagctagaagtgacagatggaagtcctggatagcagttccctttaggactactcttctacgcagggataagccgagtagacttctccaccaatataggtaatctgtgctagaaaggaacttacaatagcatcagaaacctcctggggccccccattctgctccagttcctagtgctaatattcacagaagcacctgggtccctgcaatctcccacattcaaaagaggaagtcaaaagtacaaaagtagtgaaggaaacagaaacatacaatgttgactgttgggctaaagactgttgaggctactacatggaggaagtaatgttcacacaaactaactggcagttagcatatggatatttgagatacagctgatacatatatatatatatatatacatatatatatatacatatatatatatataaatttttttttttttgagacggagtctcgctctgtcatccaggctggaatgcaatggcacgatcttggctcaccacaacctccacctcctgggttcaagcgattctcctgcctcagcctcccgaatagctgggattacaggcatacactaccacacccagctaattttgtatttttagtagagacagggtttctccatgttgttcaggttggtctcgaactcccgacctcagcctcccaaagtgctgggattacaggcgtaagccaccacacccagccgatacagctgcttactatagaatatagagatggccactgagtggatttcaaaggcactcagaaaatgttcaggactcaaactgctatgaagtctaacattagccaatttgaatacaaaaacacatatgccatacactaagtaaatacagtcaggtaaaggaaaaacaattacataattgcagggtggtttttattctgaaatcttcagattgctgttattatattaaaaaacagaatataggcttcttgaaaaaataagggtgttaaatgaacatgtttttcctctgaaagagttgtaggatcatctttatttattgaataccagtttcatgccaagcattggctaagggccaagagggaaaaaaatacaaacagctatagtatcatttgtatgacttgccccctcctttttttttatttttttattttttttttggagataagagtctcgctctgtcaccgaggatccacctgccttggcctcccaaagtgctaggattacaggcgttagccaccgtgcctggcctggtatgaccccttaaaattttttttctagtcactggatttgctttttgtttctgaaaaggatatttcttgttttgcttataaaagaaataaatgctaattataaaaaaaattatcggccatgggtggtggcttacacctgtaattccagtgttttgggaggccaaggcaggaagatcacttgaggccaggagctcaaggtcagcctgggcaacatagtgagacccccatctctacagaaaacgaaaacaaattagccaggcatggtggtgtgcacctgtaatctcggctactcaggaggctgaggtggggggatcacttgagctcaggagttccaggctgcagtgaattatgatcgtgccattcattgcactcctgcctggacaacaaagagaccttatcacaaaacaacaacaacaaaaagtctatcagccaatcacctagggatagccacttgacattacggataattagcctttcatattttttctggtatttgataaccaagatgaaatgcagaagaaatttgaatacatattctctagcatttcctgtaatgcttcttcctccaggatttcaaatgtgggaagccatcacccaaaaatatggtttcgaccatgttagtactggagttgggatttagggaagatctggtccccacctgtggaggtctgcagagtcaggtgaaacattagccttgtttgcgtttccagggctgggctctcgccactgtttgctatgcaccatctggagcctgcatcacgcatggcctcagccagcccggaagcggagagcgtggtggcgggggcgctagtgagctcctcctgtgtaccaggtcccgagctaaggttttgagacacctcagtgaacttggcccacaaaatcccctgcctttgtggagcttaccctcagtgttggggatttgggacttacttttcccaaagccaagctaattattgtaaaaggggtgagtgacgaaaacggaatcattgcaaggtccttacctcttatttcatgagattggcggcatgagtgtgtctagagagctgtggttgcttactcttacacgtgggcgtgtaccccaagactagaatccagggtccatctaataagcattcaaatcagcgggcgggggagggggtgggtgatagtttcttgtcttactttccaatcccagcgttgctcagcccataccatctgataaaaactttttacaatttagaaatgcccggtgagcctgggcgcccggagcgacagagcggcgggtgcccgggaggaagcggcgccagccctgcccagctttgcggctcctggcgcctgccgctggggctgggctccgagaccgcgcgcccgctgcccggttcacgccgagtccccagcggcgcgccgccccggcgaatggtcccccgagggcagccatccgcagacgcagttccctgattgccccagcaaaaatgggcggtctccttgggatagattctgcgcgggctgctcttaagaatttaccggcaggcaggtctggtcccagcagaggagacccaggggtcccagagctgggctggcgggaggcgtaatccggcggggtgagggttgatcgaagagccccgcgcgcagctgccgctcacagccccttcccgagtgcagagcgggcagagaaggtaagaagcccacccacccactccccgcctcctgaagcccgtgcttcagacctgtccctgcaactggggaagagccaggcgggctctccgcctcctcgatcctcctccctggaagaggcccgaaggcagcggccgccagacacacgttcgcctagtccgtcacccgacggctctgcccctcaacaggggctcctccaccgccacgtacacatccgcggctcatgcacgccctgaatgatcggctcagccggaccccctggttttttgttcacttactggaaccttcttttgcagaaaatcttgtttgctgtgggatccacagatgggtccgcctccttcttttagtgtaaaaaagcagtgaacggctattatggtacatttttaaaaaaatcaaacagaagccaaaaccactttaatgtctatagaaggacacgtctaatacatttaaaataagcttcagctgttctgaatacagttcatggtatttttatttaaagacaaattctttagaatgagcctgtaaggtgggtaggtcagaaaccccattttacagtttaacaagtggacatttaaacggctagttaaatgatgagtctaagatcacggtttcagaaactaagacttgggcaaagctgctctcactccgaatctaattcatgttccatgaccctacactgcctctcatgatgtagagaaatgaggagtaaccttaccaaatgtacttcttaataaactgcccctaccacacagcagggtccgtcaggccagcgctgacacaggtttgcaggctcccagtaaatatgaagtgaaggacaagtcaggaagtgggaagactggaaaggattgctcatcggaaatcagtccaaaacaaaaaagaataaattaggaacaagaaggggggatatacacaaaagtttaggatgatgccattttagagaatgctattttctataattcactactgtcggccatgatcacaggttgctcgtttgtttcgcagcctgtgtgaataccaggtacctgtctaaaaacagtacacgagcaacactcttcagctcccttaccccacgagaagcaactgttcaccttcccagttccgtgaattctgtggtttttgttttggggggttttgttgaggtggagtctcactctgtcgcccaggctggggtgcagaagtatgacctcggcttaatgcaacctccaccttcccggttcaagcgattctcctgcctcggcctcccgagtagctggagttacaggcacgcgccaccaagcctggctaattttttgcatttttagtagaggcggggtttcgccatactggccaggctggtctcgaattcctgacctcaaatgatccgtcggcctcggcctcccaaagtgccgggattacagacctgagtcaccgcgcccggcccagttcggtgaattccttcccctcacccccagggtctctatcttgtgaagggtggagatagaaattctgttcttcaaacagagcaacttcctctacactgcctcagcatcctgcccctaaagtgggcctttaaagagcaacctcgagatttcttttatatatatatatatattttattatactttaagttctagggtacatgtgcacaacgtgcaggtttgttacatatgtatacatgtgccatgttggtgtgctgcacccattaactcgtcatttacattaggtatatctcctaatgctatccctctcccctccccccaccccacaacagagatttctaacaccactctgccttttcagtccactgcttttaaggccctgcactgaaaatgcaagctcaggcgccggtggtcgttgtgacccaacctggagtcggtcccggtccggccccccagaactccaactggcagacaggcatgtgtgactgtttcagcgactgcggagtctgtaagtgtgtggggaaagaacccccttatttgataccgaggtgaattaccaatgactcaatccttcccccattcctcccttattgtgtagaaaaagtttctaacttattacaagcactctgcatgtcaggcaatggtatgtttagcaaaaaaaaaaaaaaaaaaaaaaaaaaaaaaaaaaaaagcctccgtatggataacttaattttctccagcccttcaaagaacagtcttactcctaaaataagttctgggttaagataatagcaaaagagctgattgattctaacaacgagcaggtctggcctgactaaatagaacttacattaatttaaaaattccaagttgaacttgatttttttagaaagactgttcttgcaacatataaattaacctcattaatttatagttacattgtgtccagtacccaagggttagattcatggtttccatatgcgttcagagaaaactattttaatgtatatatttaggttttttacacacctgagaataaagaattctggaggcaattagcttgtcactggggaaaaaaaatctctgactgctttgtttttttttttgttttttttttttgtttgtttttgagacgaagtctcactcttgtccccctggctggagtgcaatggcacgatctccactcactgcaacctccgcctcccaggttcaagagattctcctgcctcagcctcctgagtagctgggattacaggcacccgtcaccacacctggctaatttttgtatttttagtagagacaaggtttcaccatgttggccaggctggtctcaaactcctgacctcaggtgatccgcctgcctgagcctcccaaagtactgggattacaagcgtgagccaccgcacccaggctgttttctttttataagatctccttaaaagatctcttacttagagatgtctctaaatgaacttggaggaaagaagtttggggtgtgatgggcgttgcagcgaggagcaaggtgcttagttctcaataatgaccaagaaataaacaaacccacctgcagaaaacttgctctgaagtctatttgcttgtcttggtccacatagtactctaaggcaagaaaataaaatacattatcctttaaagttgaaaatgactttgaatgagagttgaattgaaccttgtttttgttttttgttttttttgagacacagtctcactttgtcacccaggctagaatgtagtggtgcaatctcagctcactgcaattgtctgtctccctggttcaagtgattctcctaccttggcctccgagtagctggggttacaggcacgcacaaccacacccagccaatttttgtatttttagtagagatggggtttcatcgtgttgggcaggccggtctcaaactcctgacatcaagtgatctgcccacctcggccttccaaagtgctaggattacaggcataagccaccatacctggcctgaaattgaactttgaatgtgataagaattacaatcaggctgggcgtggtggctcacacctgtaatcccagcactttgggaggccaaggcgggcagatcacaaggtcaggagttcaagaccagcctggccaagatggtgaaaccccatctctactaaaaaatacaaaaattaaccgggcatggtggtgggtgcctgtagtcccagctacttgggaggctgaggcagaagaattgcttgaacctgagaggtagaggttgcagtgagctaagatcgcaccattgcactcgaggctgcatctcaaaaataaataaataaataagtaaataaaataaaataaaaataaaaaaagaattacacactcagtagcatagcaagggaaaattacctagggaatgaaacaattgtgttggttttttcactctcattgtctggggtgacgacttaagcttctcagggcaccagttcaacatctgcaaatcaaagtgagaattagactgcattggtgaaactctctaaagatgaacattttaaccctctcacccctagtattattattacccaattaaatgaatacacaagttccaatcaaagcttaattgcttaatagcaaattttcttaaatgtagatctgatcaaattattctcccctcttaaaatgtttcagtggttcctcataactctcatggcacactcttaacacttacagtttttcatcatctggtccccaacctgcctcaacccccagttaaatcctcatcccatcccagggctccagccatattgaatgaacactagcctttgccaggatatgccagattacctcgaagaggctcttttcctttttgtccacctttaaaacatctaatcatccttcaatatttcctgagcatttcctactcagggccttgtaggccccatttttctgggtgacctgttggtatttcaaacacgtttctgttggagaactttccctatgatctgccttcactactagacttgagccaggggcactgtcagtactgaggataatgtctggaaaatgaataagttttactgcatcaatgaacaaatgaatgaaggcagaactatgacaagaatgatatactttgcaaaggcgtggtcattcctgaaatgatttgcgggtggagcgagaaattgatgcaaagctgaatagaaacattgaagatggacttagcagcaggctttgcggccaaggccccatgactcggactgccatttgtgaaagcaagctaaactttcagctgtggcaggggcagagtggagtaatatgtacccctggtttcatgtgtctaggtctctgtggcacattttgtttcccgtgccttgggtgtcaagttgcagctgatatgaatgaatgctgtctgtgtggaacaagcgtcgcaatgaggactctctacaggacccgatatggcatccctgtgagtctcttaccataccatctcactcaaatatgcaccccattcaaaataattattataaacatggagatcatttgatgtatacatcttctgaaattgattgataagagttccctagcatgtgcaatcttgcattcagttgtagcaacagatcttctggttatgtggcctccttctaggtttctgctgaaaacctgagaaaattgataactcatatttgcaatggatgtcataccatggaagaggcttatttaggatctactgtggcgtggatgcattacatgtattatctcacttaatcctcacatcatctctgtaaagtgggtaggtccacaacattttgccaaagagaactttaaagttttaagaggtggagtaattccctcaaagataatagtagagaaagagtcgatactcaattctaactgtccattcatacactttccattacaccaactccactttgtgtaggtgagagattatattacttagagtcctcctaagtgcattagaaacagaaccaataagattgggagtggatgtgtgtatacacacatatatatatatacaggcaaacctcagatatacaggtttagttctagaccaccacaataaagcaaatattgcaataaagcaagtcacatgaattttttggtttcccagtgcacataaaaggtatgcttatactacactatagtctgttaagtatgcaataacattatgtctcaaaaaacaacatatgtaccttaattttaaaatactttatggctaaaaaatactaataataatctatctgaatcttcagcaattcataatgtttttgcctgtggagggtcttgcctcagtgttggtggctgctgattgatcagggtgctggatactgaaggttggggtgactgtggcaatttcttcaagtaaggcaacaatggtctgggcgtggtggctcacacctataatcccagcacttcgggaggcccaggagggctgatcacttgaggtcaggagttaaagaccagcctggccaacatggtgaaacccctgtctactaaaaatatagaaattagccaggcgtggtggcaggtgcctgtaatcccagctacttgggaggctgaggcaggagaattgcttgaacccaggagggaggctgcagtgagcccagattgcgcctcagcactccagcctggacaacagagcaagactccatctcaaacaaaacaaaacaaaaacaaaaaacaaataaggcaacaatgaagtctgcctcattgattgaccattcctttcatgaaaggaaagatttctatgctatttggtagcattttacctacaatagaacttctttcaaaattggattcagtcctctcaaaccctgttacggctttatcaactaagcttatggaatattctcaatcctttgttgttatttcaaccatggtcacagcatcttcaccaggagttgattccatctcaagaaaccactttctttctttctttctttctttgttgagatggagtctcactctgttgccaggctggagtgcagtggtgagatctcggctcactgcaacctccgcctcccaggttcaagcgattctcctgcctcatcctcccgagtagctgagattacaggtacccgccaccgtgcccagctaatttttgtatttttagtagagacagggtttcaccatgttggccaggatggtcttgatctcttgaccttgtgatccgcccgcctcggcctcccacagtgctgggattacaggcagaagccaccgcgcccagcctcaagaaatagctttcttttttttttttttaaagggagtcttgctctgtcacccaggctggagtgcagtggcgccatctcggctcactgcaagctccgcctcccagattcacgccattctcctgcctcggcctcctgagtagctgggattacaggtgcccgccactacgcccggctaattttttgtatttttagtagagacggggtttcaccgtgttagccagtattgtctcaatctcctgacctcatgatccgcccgcctcggcctcccaaggtgttgggattacaggcgtgagccaccgcgcccggccaagaaacagctttctttgctcatccataagaagtagctcctcaagttttatcatgagattgcagcaattcagtgacatctttaggatccatttctaattctagttctcttgctatttctaccacatctgtagttactttctctactgaagtcttgaacacctcaaagtcatccatgagggatagaatcaacttcttccaatctcctttactgttgatattttgatctccccccaggaatcatgaatgtttttctgttttgttttttgagacagggtctcactctgtcacccaggctggagtgcagtggcgccgtctcggctcactgcagccttcccctcccaggttcaagcaattctcccacctcagcctcctgagtacctggggctatagatgtgcagcatcacacccagttaattttttatttttattttttggtagagatgggtttttaccatgttggccaggctggtctcgaaactcctgacctcaagtgatccgcctgccttggcctccctaagtgctgagattacagctgtgagccaccacacctggccaggaatcatgaatgttcttaatgaaacctaaaattattaatcatttccacaagattttcaatttattttccctagatccatcagaggtatcactgtctatggcagctacagccttcaaaagtgtttttttttttaaataataagacttgaaaatcaaaattactccttgattggctgcagaataggtgttcttttagaaggcatgaaaataacattaatctctttgtatgtcttcatcagagttcttggatgtctaggtacattgttagtgaacagtaatattttgaaaataatctttctttgtgagtataggtttcagttgtgggcttaatatttggtaaacaatgctgtcaacacgtgctgtcatcaggttttgtggttccatttatagagcacaggcagatttagcataattatttttttttctcatggggtaggggaaagaaaagtgattagaataattcttaagggctctaggattttgcaaatagtaaatgagcattggcttcaacttaaagtcaccagttgcattatctcctaacaagagagtcagcctgtctttggcacctttgaatacaggcacggacttctcctttctaactttgaatttccttgatggcatcttcttccaataaggctgtttcattttcattgaaaatctgttttttagcgtagccaccttaatcaattatcttagctaggccttctggataacttgccacaccttctccatcagcacttgctgcttcgccttgtgcttttatgttacggagaagacatctttccttaaacctcatgaagcaacctcttttagcttcagacttttcttttgcagctttcttttttgttgttgtttttgtttttgttttgagatgcagtctcgctctgtcgtcaggctggagtgcagtggggcacgatcttggctcactgcaaactctgcctcccgggttcaagcgattctcctgcctcagcctcgccagtagctgggattacaggcccgtgccgccacacccagctaatttttttgtatttttagtagagacgggatttcaccatgttggtcaggatggtctcaatctcctgacctcgtgatctgcccaactcggcctcccaaagtgctgggattataggcatgagccaccacgcccagcttcttctgcagctttgtctctcttatccttcatagaacccgaagagcactggggccttgctgtggattaggctttgacttatgggaatgttgtggctggtttggtctcctatccagaccactcaaactttctccagattagcaataaggttgttttgctttcctatcatttttatgttcaccggagtagcatgtttaatttccttcaagaacttttccactgcattcacaacttggctaaccatttggcacaagaggactagctttcagcctctctctggtttcaatatgtttttctcactaagcttaattatttctagcttttgatttaagtaggagatatgtgactcttcctttcatttgaacatttagaggccattgtagggttattggttgacctaatttcagtattgttgtgtctcagggaatagagaggcccaaggagaggaagagagataggagaacagaacagctggtcagtggagcagtcagaatacacacatttatcaattaaatttgctgtcggtattagtccgttctcgcattgctataaagaagtacctgaggctgggtaacttataaagaaaaggttctcgcattgctataaagaagtacctgagactgggtaatttataaagaaaagaggtttaattggctcatggttccacaggctgtacaggaagcatagtggcatctgcttctagggagacctgtggaagcttacaattatggcagaaagcaaagggggagccagcacttcacatgactggagcaggaggaagggagacagaggtgctacacatttttttttttttttttgagatggagtctcgctctgtcacccaggctggagtgcagtggcacgatcttggctcactgcaagctccacctcctgggttcacgccattctcctgcctcagcctcccaagtagctgggactacaggagcccgccaccacgcctggctatttttttgtatttttagtagagacggggttccaccgtctaggcaggatgttaggcaagatggtctcgatctcctgaccttgtgatctgcccgcctcgcgcgcccggcagttttttgttttttttttttgagacagagtctcgctctgtcaccaggctggagtgcagtggtatgatctcgtctcactgcaacctctgcctcccaggttcaagcaattttcctgcctcagcctcctgagtagctgggagtacgggtgtgcgtcaccacacccatctaatttttttttttttttgtatttttagtagagatggggtttcaccatgttggccaggatggtctagatttcttgaccctgtgatccgcctgccttggccttccaaagtgctgggattacaggtgtgagccaccatgcccagcctctgctacacacttttaaacaaccagatctcacgagaactcacgcactattggaacacagtactaaagggaaaatctgctgctatgatccagtcacctcccaccaggccccacctccaacattggggattacatttgatgtgagatttgggtggggacaacatccaaactatatcaccatcttatatggatgggtgcagttcatggtgccccaaaataaatagtaacatcaaactcttaatgatcacaggtggccataacagatataataagaatgaaaaaaattgaaatattgcaagaatttccaaactgtgacacagagacatgaagtgagcacacgctattggaaaaaatggcacccttagacttgcttgatgcagggttgccacaaaccttcaatttgtaaatgcagtgagccaagattgcatcattgtactccagcctggacaagaatgaaactccatctcaaaaaaaaaaaaagttatagctgattataaaatcatcttttaaagaggaccaaagtgagaaaacaattgtctgtggatgacaaaaacattttagggcagccacagttaaaggcacaattgacaaggaaatttacttctgtggcacacagtcatttaacataataattataattattattgttaacatatactaagtcatattagaattatagcagttttatataattttggaacatacaccaataacacatttacacaaatatagaccaaagaaagtcatttgatatttgacaatgcttcctgtatgatttttgtaccaaataagccattttgagactttagaggacctaatatctaaatattaggttagaaagagacataatttataatttgattttggaaagcttgtcaaatatcaaaggtttaaaacaccagatatcacaaaatagaatcccaagtcaccataagtcattcatttggcaaaaataactcaaaaaaattaaaaaaaaaaaaacctttattctgatagaggagacttagctttccaaacaagactcaatgaagatagcatgaagccagctgaatctgtctcttctttctgtcctcctttttttccctgccatttacccaaaggagaaaacaaaactctttcattatcttttaacattacataaaaatcatctttgaaagagaaaaccaaatttcatgtttgcattagtgcatctttggtgctaaagctagtttttacataaaattgtatatatctatccagttttaattagtttgaccataaggtaagattttcataaactttttagaacgctttataattttccatcaaacagaagatccattttctaagaaaaccctgttatttggacacatgggcccagattctggccccacagcagtgtgattttaatgttttaacctatggaaaaatgctaaataattttttttagctcttggccaacttgtttatacccacagaattttttacaagatcaaccctttacaaacccttttcactttgcttaaaccttcagtttcgtcccgttagtcttttaggttaagacaatctttaaaaccctcaggcccggcgcggtggctcacgcctgtaatcccagcactttgggaggccgaggtgagcagatcacaaggtcaggagattgggacaatcctggccaacatggtgaaaccccatctctactaaaaatacaaaaattagctgagcatgatggcgcgcacctgcagtcctggctactcgggaggctatgataggagaatcacttgaacccgggaggcggaggttgcggtgagccgagatcacgccactgcactctagcctggtggcagagcgagactccatctcaaaaaaaaaaaaaaaaaccctcaaaactagacaaaattacattccgtttaacaaaagccatattcctatgccttcttataatcttttaccaaaaacacattccctacacacctttatgtaaaactgtttctccagtggtctcaattacatgttaccatattaactcttagcaacttttatttttagtgaaaactctgataagtaagatattttaattatgtattaggggtggagcctaggacattagacagaaatgaagataaggtcagactctttttagcatagctagcgggcatggctctccatatgtccccaggccttatatattatctaagcctccaaagtaggtaaatcaaacaattttcaaaagtcaaagaaacagcttgaccttaaagcatttagcaaatctgaccttaatttagggcaaatgtctacattttcaagacaacttattttaccaataatctttaaaactgtccttatttccaaaagattactaaagccatgtgaacaaaaaggcgttaaagtttctatttttctgacaaaatattttatttaagtgcttttttcctaagccaattaatcagagctcttttatatataaacatcacacacacacacacatacacacccacacacacacacaccccacatgtaaatagagacagacagaagattgggcacttgtaagatttttcatttgccaatttcttaattggatgaccggcttcagggtggagctcttggaggaatagagctgggacagcatgcgtttctaggaccaaataagtagcaaataaacagctgaaggcaagacagatctccaaagttaaaggtaccgttttatactggtttctccatccccaaaaggagggaaatactacgggagaagacggtgcagtgcttttactgactgtgcatttcattgcaaagcaacccaaagccaatcagcccattttgtaatcagcccatcttcatgagagtctcatctcctagtgaggggtgaggatgttggatggtggaaaccaaaagaaagtatccccatatggtcacaagatttagctctgaaggacacaaaacaagacatagaaatttcttacagtattggctatcatatatcaagtaggaaaaataagttataggatagtatgacctcatttttaaaaaacaaacgaactcctgaaatgccaaactctatatgtctatgtccatagctgtatcttcgtctaatctatatttatatgagtcataggcatagaacaaaatctaaggaaagagcctacacagcaaattattaataggttatctctggtagtgacattgggtagaaagggattagattgttatttttcacttaatattgttctgtgtttcaatttgtcattaaaattatctatagcatgcatttaaaattgttttaatttttatttaaattttgttcacaagtgttgtcaataagcattttttttttgtaattcacaaaatgataaatatttttaagtgaaaatagaaaatagtttcagctaggtgcagctgagcatgcctgcagtcctagcctgaaactctttttcaggaggctgaggtggtgaaactgcctttgcaaaattatgactgagacagtgaaagagatctaacttaactgactccatcttacttctaaccgccaagctgtccttgttcattcctgggtgtaggctgaaccaactttgggagaaacgtagtttatagtttaaacaaacatggtaatagccctttcccaaagcagacctcccttttgcctggggaatagattgcctttggaggactaacattagccacaagattaaaattatagtttagaagtcatggagctggaggctacaagattctgaccctccctgaactgttactaagatcagtgcttaacatcgtttgcagaccctgcgcttgatggagatgagggttcatctagtgccctgcccgtgactgtgttcagtttcaagtccattaaatgccaggaatgtaaatgccactgttttctaatgcagctttaatttttttatttatcaaaaccctgaaacgaagtgtttttaaaatcatctaattttacaaagtagtccccaaaagtttcttccttacttcttccctagagctgatgtcttgggaattttcctccatatctccaaatcacacacttgtattgctacttcttgacttttagttagaggcattatctgttaacctcccactagggaagatgtgaatttagttctattttctcctcctcccgcactacacacatgtgccctctccccctacccctttctttcccatatagttatatggttaattccatattcagtgtttacattttgatacttatatttgttttattcaacttcagagctgagtcatatagtaaatatgattgctttttctgcttaattttgtttttcctggtattggtaattattgagtttttgttagtatttttcctctatttacttatgagtcctttaaccccaaattgtttgccagttttctgaatttcttcccaacaacttcaacacatagatgttttatcattttcatcttcatgatgaaatcacttccagtcctactaccttttaaactagttgcccattattcctagtgcttagctctcatcctgggatctgccttcaccatgaccctggagattccattagcttctctcctgtattagactccttcttcttatcttcctctttcttggtttacacccgcattttggtggaacacatcccctactagcttcctatgacagagaggaggtccaggagaaaagagttttgaaattctacttcccaaggatatttaactctcatacttgatagtttggttggacatctccttacattttcagaaacgtaaagtatagaaaaatattttccgtcataaaatgagacaacatttatgtgaaaaagtgaggtaatattttcctaaatgtatccatccaaactctgaatctgaaagatcagtgccttctgcttctcttcaagatgtggcaagtcttaattccaaataggtgaattttatatttttatttctttttggttttcaaacagggatctatttgtgatgactatatggcaactctttgctgtcctcattgtactctttgccaaatcaagagagatatcaacagaaggagagccatgcgtactttctaaaaactgatggtgagtcaatgcaaacatgcctctcagaacatgtgggtttttagaaatatcactaaagactttgtcaattatttgttgttttgaataattcagcaataactatttcttaagtctcctgaagtgctatcataatatcaagattggctttaattttcttcttatgaagaagatagctctatactttgaaaccatattttagtaaataaaggaatggtgaattttctaaacttctcagaattctggtgatctattaaggaagcacttaccacttgtaaaataccagagtatggtgagatacaaaagaattagaaaacatgttccctgctaagacaaacaagttgacaaaaggaattcgtaaataattataaaatagaagagtaaagaaaataacattctgtatgatatttggattgattgtggcataaagcatctatcatagcaaggtgaggttaaatagaaaactcctgttggagaagctgaactttgaaagaggtgaacatagaatttagaatgtttggaaatgttatatagaattaaccatctgaaattcaatcaagtcattttcaactaatttttctcaggactatctattgaggatgtagttaagtagaaatcaacatgacttactccatcccctgtagaatatatattaagtatgggaagaacacaatttttctactctttgtaatatccagtttccttcctgaagtgataaggactctgtatgggttaataaaaataactcttgggagatacgtaaaaaaatgttcatttacttagcaagtaatgtattaaggatctaggatcaagtatatattatcttagcaactaatgtatcaatgtatcaatatctaagactaggtaagatactgttaggtattgtagtagggttggggagcaagataaataagctagtccctctgtcattatagaatttatacgaaaaagggggattagacaaacccctaactaaaatgcagaattcaattaatgcctatagacaaagcggtattttatgttcagaggaggaaaagatcacatcttgtaagatgtataggtgaaagtttcttgaaagcagtgatttttaattctaaaggggaagtgcgtattagttctcaacaagaaacagatggcactcaaactgtgatagttcaaagatttaatgaagactaattataaaggtgtgggtggggcattgtagggagatgacaagggatggcataataacctgcctggcaacagccccagggaggagaagagggagcagtgacctgaatccttaaggagagagctgtgtgaagaggcctgccctgaaagaaacagtatcctctcaagagagggttgtgagcagcccgaggcaacccatagaactgaaaaagtaccctgacctcactttcggatgtccttctggttttcccattggctgaacccaccagaaaggcagagggcagcaaagtgtcacggtagtccgcaggtcgcttcccagggcacacagcaggatggtcaagggagtaagtaaatcagataggggcaaacagaggatcactgactcaagatgtggttttaattaatagaaatggaggctgagtgcagtggctcacacctgtgatcccagcactttgggaggccaaggcaagaggactgcttgaacccaggagttcaagaccagcctggggaacatgttgaaaccctgtctcttgaaaaaatacaaaaattagctaggtgtggtggtgcacgcctgtagtcccagatacttgggaggctgaggtgggaggatcacttgagcctgggaggtagaagctgcagtgagctatgatcacaccactgcactccagccctgtctcaaaaaaaaaaaaaaaaaaaaaaaggaaaagaaaaagaaaagaaatgaaatgttgcttctaatcagcaatattaatgaaactagagaggcaaaaacagagaaaatatctttatgagcttaggtccaacttggctagaacatatggcataagtagaaaaataacgaaaaataaaagattttaaaggccttagcatgcgatgtctgaatactaagctaatgacttggtaggaattgggaaattattgcaggcttgaagtaaatgaatagaactactctttagaaatatgaatctaaggctgggcatggtggctcatgcctataatcccaacactttgggagaccgaggtgggaggatcacttgagctcaggagttcagcaccagcgaccagcctgggcaacatagcaagacctcatctctactaaaaagtaaaaataaaaataaataaaattttaaaataataaatattaatctaataatagtatatagtacagattgtacaggatgaggccagaagcaaagatggggagttagatcattccaacactgtttacttaaataaatacatgaaacaatttggatcaaatatctacccacacattcatagtaatgagtcctgatagctcaagtgttttctttaacctcagggaaaatatctcactgaatctttaggtgggtttgaagtaaaataccttggcggtcctgactcctcctcatcaacttggaccctacatcactcactggcaataaaactttagacaaacagatatcgaaatggggagctaaacaagagagaaagagcaaggaataacaacatgatttacgttaaaatagattgagatgaaggacataggaatccactggaaaagctccccatagtccaaactggggcactttgaggaacaaaataaggtcgtgttagattataacccaaagtataaaatatctatgagtttgtgctgacataaatgactgaataaaatttgaaaattgaaaaaaagtatgtatgttgaaagcagggaaaactgggaattttgagagcaaagaagtggcaggagaatttctgtatgggagaagagacacatctcccatatggaactccaaatatttaggtagatactccttcctcaaggagagcggcatgattccccaccctgaagtgggggtttgcatagtgacttccttccaaaaagtacagcatgaaaagtacagcatgcaagtgcactctctatactgtatggagtaactccacaatggagaaacctgacacaatgacctgagccaggtaatcaacgtcaccatcattggtaataagtcatattgatagtttgcacccctgatttgatgtgatgagaatggcactttacctttgtggtcttctccccaaaacctcttaactccagtctaaccatgagaaaaacatcagacaaacctaaactgaggcacattccacaaaatacctgactactcctcctgaaaactgtcagggtcatcaaaaacaaggaaaggctgagaaacagtcacagtttagaggagcctaagagaagatgacaattaaatgtaatgtggtatgctggatgagatgctggaacagaaaattaaagtaggtaaaaactgagtaatctgaaggtagtatgggctttgattagtagtaatgcatcagtatgggttcattagttttgacaaacctcccatggtaatgtaagatgttaaccaacaggaaaattgggtgccagatacatgagagctcgctgtactatctttgcaacttttccgtcaatcaaaaatgattctgcaattaaaagtttattaaaaattataaaagtaccttaagaaaattcaaaactcttgtgtgtcctttataggtgaaaagctcttaccgaagcaacaaaattcagcagacacctcttcagcttgagttcttcaccatcttttgcaactgaaatatgatggatatgcttaagtacaactgatggcatgaaaaaaatcaaatttttgatttattataaatgaatgttgtccctgaacttagctaaatggtgcaacttagtttctccttgctttcatattatcgaattcgaatttcctggcttataaactttttaaattacatttgaaatataaaccaaatgaaatattttactgataa

SEQ ID NO: 113 - DNA, 9892 bp, Homo sapiens
gccacattcaccgcttactccattgcttgctggaagggagtcaggtggttattcaaagatgctttttctttaagagaatggctatattaagtacgcagttttcagcacttttagtaaagcgagctctactctgaacaaaaccagcaacccgagaagcgataatgatgtgaagacagttgaggagcacatccctggcgtaagactggactgcctgtggtccaaaccatgcttcaccacgtcagtatactcatctttaaaattaagatactaatatgtgccatctcagcgcggttgtgtagattagttactatatttaaaatgcctgctacaccataagcagcaaatgttagatactgttttaatctttggcatatatcatgatacatttgctacagtggggtaggggtaagcgtgggggtctagggcagttagacacagtgggccatttagggacagaataccccagtacacgtgtacttaggagtatttcagttctccgtggctagtaaagccaagggatcaggtagggtgaatgagtccttcccaaggtcacctagcattgatggcggagacactcggcgttttctgggccgaatcccttcccatcagccaccggcgggtttgggagggtgtggaagagtgttggagtcaccttaagtgcccttaattcctcatcctggcattagggttcaggagtagagaagggagactaagcgggacgcttcagtatgcgcccttggggctgaaggaacctccccgctaaacctcggtttccctgaccccaaagggcagcgctcactggggaagcggcgccgccagctgccaggacgctcccgcgcagcccggtttccctacgccggggcggggcagaggggcggaaggggcggggcggccgggccgcggcggcctccgactggatacggcggatcgccgggggcctgagggtggagtcccggccggaggcaggccgggactctggtgggtctaggcgcggatcggacccaagcaggtcggcggcggcggcaggagagcggccgggcgtcagctcctcgacccccgtgtcgggctagtccagcgaggcggacgggcggcgtgggcccatggccaggcccggcatggagcggtggcgcgaccggctggcgctggtgacgggggcctcggggggcatcggcgcggccgtggcccgggccctggtccagcagggactgaaggtggtgggctgcgcccgcactgtgggcaacatcgaggtgaggccgggccgagggcggggacgtcgcgggcgggtcgtttccccggagtcgggttcacctgcccgccacgccggggccctttgctctagtcggggcggcctctcggatcccttaaggcaggcttctcccttccccttaagtctcatctttgaaggagccgtttgccctgacagcccctgctcgagttaccgaatctccgaccccggcatctccccacccgcccctcgggtctccccagggtattggcccgaggaaggggaagccggaggtcgggggtggtggtctcgcccctgtggccttctcgcccccggcggccaagtgcctctaatctccagaagtcacccaccacgcagggcaaggtggctggccaaccagatgggcaggagccaggactgaggttggggttggggtgggagctttactgaagagcctcagccccgccccctcacctcgggggtaactcatgcccagtggcatgaggaatgaatggaatattcattagtgggccctcctccactctcctggggcgaacagagtgggtgaaatcgggcggaaaccttgagaggataaagcaacctggaactccttactctgctcttgacgtggggttgggagccctcagagctcagagaaaaatcaagatggccattttggagcagggaggaatttctgtgctaggctctctctggatgtgccctgtaagctcattctcagtgtcgggctagtgcttagctgcagggctttatctccaccgtgctcaaagtcctcaggcagggaaagggtaaggaggccttgggtgggggcagagggagaaggtatacaggaaggaggactgtcccctcccctgctgctgaccaaaggtatgctttataacccagataatcccaaggtcacctggctccatcactgccccactctttcctccctttatcctattctgaggagctcaggacccagccccagccttggagcccagaggatcaggccagggattaaacaactggattctgtaattctgaagccactcttgccttctcacctactcccctaccgcaagctagccaggaagggggggcctgagccccaaggggatccccaggctgatcactcagtcccagggtgactccatgtctgagaggagaatgcccctgttgtgagggggtgacatgatgttgtagatcattactgaggggaggtagggagatcaggtggcacaggtggggcaacaggaaggcagtgacagggagaaatacattctgagctcatcccttctggttttcttgtggcaggaattttgagtctagaggaggaagcgggaagatgtacaccaggggaggggaaagctgcagtcttccttgcccacagtctgctttgattgattcagtcattgatgttaaagcagaatttgggttctagcttcctacagagaaaactcctgtttcctgaagtgatcaaatgtgggtaaaatctggtgaaggggggtttctgattctcagaggactataccttttgaactcacagaaagtcaaagcagaaaagaatgtcccaagacacccgatcctgtcctttattcctggctcagcttgggaggaggaaggggctccaggccagggcagctggccaagctggccttcctctagggcaccgcacgccccttccccctcgcccacgtctacacagtcaccatcacaaggctcaagtgcccagtcactggcttccaaagaaggccacagaacgtattttcttcttgcctctgaatgtcagcttccccctgggctgcctctcagtggctctgccttctcaggtctttcttggcatgctgagggcctggagatgcacagggggtgttcaatggcacctgccacctgaattgcctcatagtctcctgagaaacctcagaggggagggtggtgcaccagggctcagagagaaagaatctgtcctgactttctgacccctcctttaggtagggagagaagattggcagctgggcttggttgaaaggcatgtctgagaactctgagccagttggctgcagtttgcgaggggaggggaatagttcagagatgagggactggctgacacaatgcagaagaagctgggttaaccagcccagtgactctcgggactggtgtagaagcatgaagtggtggagaggcgcatattacctatgggcagaagaggtgttcctgttgaggaagaggcagaaaagagagagcactccattctctaggtccctggcccctgttccacccaggacttgagtttatttatttatttatttatttatttgagacacagtcttgctctgtcacccaggctggagtgcagtggcgtgatctcagctcctgcaacctccgcctcctgggttcaagtgattcttgtgcctcagcctcccaagtagccaccacacccagctaatttttgtattttcagtagagatagggttccaccaagttagccaaggctggtctcaaactcctgacctcaactggtccacccgccttggccttccaaagtgttgggattacaggcatgagccaccacgcccagccaggacttgagtttatagtgaggtttctccattgataacagccttttcccttcatcactcggggagcactgtcatcccttagactttgaccaaagaggacagacttaggggatgggcagtccaacatcttcgtggctgaaagtcagctgccaaaggagcatgttttatgagtgtgacgggggtcggggtctgaggctggctagggagccgtgggagtgagctgctcaccccagtcagacccctgttgggtttcataggagctggctgctgaatgtaagagtgcaggctaccccgggactttgatcccctacagatgtgacctatcaaatgaagaggacatcctctccatgttctcagctatccgttctcagcacagcggtgtagacatctgcatcaacaatgctggcttggcccggcctgacaccctgctctcaggcagcaccagtggttggaaggacatgttcaatgtaagagctccaagcctccatcttccaggtggagggtggggaggagagaggggagccaggggtttgtgaaccagagtgctgctggggacgggacatctaggaagagggagcttcgggttcccacctggggcatcttgactctctcttggcttcttgccctaccagagggatagagagtggatgaatggccatatcagctcttctcttctttgagcccctggaggtagttcttttttttttttttttttttttttttgagatagagtcttgctttgtcacccaggctggagtgcagtggcatgatctctgctcactgcaacttccgcttcccaggttcaaacgattctcctgcttgagcctcctgagtagctggaattacaggcacccatcatcaatgcccatctaatttttttgtatttttagtagagacagggtttcaccttgttggccaggctggtctcaaactcctgatctcaggtgatctgcccatgttggcctcccaacgtgctgggattacaggcatgagccaccacgcccgacctgaaggtagttcttaaagtctagagtgatttccttgtgttagaagaaagattgttaggggagagaactgctgcctgttgaatgtttcccacttgtcagtcctgtgcctgggtgcttgggaacgtgatgttatgggaagaaaaggaagagagagacaagtgatgatattcttacctagcctcactagtaactatgtgactttaggcaggttggttaccttccttgagcttcagtcttgtcacaattaattgggatgaacacacctctatcatcaatatctggggtcacagctccaatgtcccctggggccaggtaggtacataaaggagtgagggaggttaggaggggtctgtggtgtgtgaggaagcacacagccactgctcaaatcctgcatagttgctctatggtggtgtgggcccagtgtggcctgatttgatgaaattttttttttttttgaggcgaagtcttgctctgtagttaccaggctggagtgcagtggcgtgatcttggctcactgcaacctccgccttctgggttcaagctattctcctgcctcagcctcctgagtagctgggactacaggcgggcaccaccatgcccagctaattttttttgtatttagtagagatggggtttcatcatgttggccaggatggtctgtatcgcctaacctcgtgatccgcctgccttggtctcccagagtgctgggattacaggtgtgagccaccacgcccagctgatcttatgatttctttgagagaagtggggagtctgattttatgtgacacccccccactcccattcactaaaatgacagctccatgagggcaagtattttatctgttttattctctggtatggcttgatcccataagcactgaaaagatagttattgaataaatgaaactttccagtacatgttggaagggtttttaaaatgttttgaaactgtgcacaggccaaacccaactttcaggacatgggttttcaacttctggatggtatgatggggtgatagtagggtataaaagtatcctgagaagttgaaagcagtgtgtgaatggggtgttcttttctccccacaatcctttcccatctgctgacagtagacttagcacctcacagatgcttgggcctggaaatgaagccatgaaaatgaagccctcagccttcttggagatcagagccatggtcctcacccacagcacatgggtctctaaacctggacctcaactcgcccatctgtaaaatgagggacttacattaaattcctacagctcctttcagcttgaacattatctgagtctattaggatcatcctatgaggcatcttctctttccctgcccctgataccctagacctgggagatttactcacctggtcccaggggatctatttctcccactctacctgccaggggctgagttctctgcctcacaagcccacattgccaagaagatgagaaacacggctggaaacctccctgtcctggcacccatctcttcctactgccatgaacaccaagacaggttcacaccaaaggtgttctgttcctcatggcaggctctgccacctgattaagagaaacatctaatctcctgctggttccctctcttcttaagaggagaggcctgaggacctgctgaaagctttatctctgcttgtcctccgggtgaggctaatgagtggggccaacgggtggggcagtgtaggcgctttacagcagacacgccttcagacctctgttccctgaagggtggggatgtgggggtcacctctgccagagggagtaggagtggcaagttacctgaccctctagagtctccgtgcctagtcttgtagatggaacccacgttaaaggaaggcatagaaaggagggtcaggccttctcttctccactcatctcaagggaggggatggggaaggagcagagagtagctgaggaaggtagggagaggctaggctgtgtgccggaggagagagatttgtaagccattttggtaaggattttgagcagtttaggagggagcagggccagagactgtcacagagaagagaagagtagggtatttgggggaagaaatggaaatgattccctatggaattagagggtctgtgctactgttcatagaggagatggccaagacagagtctcctgggtcaggagtgggtttgaagggtttccattcttgtttgcaggaacttggggggtcagccaggtgaggagctacctctgttatcaactgggggttgcggctttagggagaggggcatctcgtgtagaagacaagatgctctgtgcctgtggctggtctccggggggacctggacactgttttggaatgccacactgcccccttcccccctagcattctgtggctccatcacttgctcagttgggccggagtggagacacctcattgccctccctggcctgcaggtgaacgtgctggccctcagcatctgcacacgggaagcctaccagtccatgaaggagcggaatgtggacgatgggcacatcattaacatcaataggtgagggcaggtggccaatgggtaccactcacccaccaggctgggtaatgtgctgcagctcacctgacctctttggacctcagtttccttggtgggaaaatacagatttaatacctgaatggcacaattatggtgagggaaagaataatgttgtcaagtaccagcccctggttggctggaatgggcagcttagccccttccctctacagctgaagcctggggcctctcctgggactaagtgcctcgattcctcaggcctggggatgaaccccacctcatggcacaaagagtactatgtacagtgtctgccactggggagccccagtctgaggggggacatggcctctacctgccttgagatgtcccaatagaaccgtatcagtgaacatacagattagatggagagaattctgacattctgcaccaccaggagagtgcattctgtcgtcagcttagggatgagttccaggaaaaggagggttttccaaagctgtttgaataaccaaaattagattagtgagctgtaggatggccagtagaggtcccctttagaagtcttcccgatgggcatctgggtggtggggctgaccgggtacggcaggagcaccactggtctccctggaacttcattctctcctctttccccttcctctccccacccagcatgtctggccaccgagtgttacccctgtctgtgacccacttctatagtgccaccaagtatgccgtcactgcgctgacagagggactgaggcaagagcttcgggaggcccagacccacatccgagccacggtgaggctgtggcctagccctggtgggcacagggtggcgcaggccctccccacccacacacaccgttcaggaagcccatgttcagaatgtgccgctcagagctcctgggagtggactgggcacagaactgggtgctgctgctccaggcatggccctatgcagcccttcatttcctcatttcactgatccaggagccaacgaccagacttagactttgagctgggagggggctgacctgagggaaagcaagggactgtgggaaaccaggtgcacagtggctggaaaccgggactctgggctcttctcttgaaggccgcatgatcgtgagcgagtcactgaacctccctaagcctcggccttctcacttgtgaaaaggagatgatgagcttttcagggacacttttttgtaaaacgtttacctgacatataggaaaggctctgtagatggtaggtatcattgtggtcactgccagtggcagcttcggagggaggaggccgctgccggatatcaggcagccatcactgtgaagctggggttctgtggcctccatcctctcccctcgacctccccaagacctggcaaagctcagcccctgagaaggccctctctgttggcccagtgcatctctccaggtgtggtggagacacaattcgccttcaaactccacgacaaggaccctgagaaggcagctgccacctatgagcaaatgaaggtggggcctccctctgagcctggtgaagccactgactccctaaatgaaggcagagggaagctcggccttcagactccactcttccagcctttgtggctcctcctggagggttggggtggatgtgtggatgccacagagaagctcagtggtgggagggaatttgagtccattctgtccttgtctcaacccattcccctggtgctctcagtgtctcaaacccgaggatgtggccgaggctgttatctacgtcctcagcacccccgcacacatccaggtgagtctggccctgactgtctactcactggaggaacccaaccagccccagaggaggggagcagggagccctgcagggccaggggagagtgtcacagctgcctcatgccttgtaccttccacagattggagacatccagatgaggcccacggagcaggtgacctagtgactgtgggagctcctccttccctccccacccttcatggcttgcctcctgcctctggattttaggtgttgatttctggatcacgggataccacttcctgtccacaccccgaccaggggctagaaaatttgtttgagatttttatatcatcttgtcaaattgcttcagttgtaaatgtgaaaaatgggctggggaaaggaggtggtgtccctaattgttttacttgttaacttgttcttgtgcccctgggcacttggcctttgtctgctctcagtgtcttccctttgacatgggaaaggagttgtggccaaaatccccatcttcttgcacctcaacgtctgtggctcagggctggggtggcagagggaggccttcaccttatatctgtgttgttatccagggctccagacttcctcctctgcctgccccactgcaccctctcccccttatctatctccttctcggctccccagcccagtcttggcttcttgtcccctcctggggtcatccctccactctgactctgactatggcagcagaacaccagggcctggcccagtggatttcatggtgatcattaaaaaagaaaaatcgcaacc

SEQ ID NO: 114 - DNA, 26160 bp, Homo sapiens
catcagtcctctaaggaacagccaaaccaaacccactgcaaatacttttttcttattataggctcctcagtgaaaaatttaacaatcctacacccagttttataatgttaaaacagcttttccaaaggtcatcaagtaaagacataaagaagtattgttaaggtgaatttggtagaacaggatcaaagatgttggaagaatttcaagatctgaaacaagtagaccagttgtgaaactggtcttgattccatctttttaaaaacataagactggaaagattgatgggcatgcttaaataagatggaaagatgatgggcatgccctcctgtgtagggcagcagtaatcaacccatggacggagccacagggccagcagctactgcttcctgtgggcactggtgcagctgtctgggtgcctgctctttccagcactgttttcatcagatcaagaatacaaatcccagatggattcaaacccatgactacaagctgtcactctgttagtctcagatgcaattaatattattgtcttccctatgttatatttgaagttcttttagttcaattcagcaaattgtattgaaacctactatgtatgagataatacgcacttgaatcctgccaactgggtcttgatgataacgctagatggaaactagaaagtttgactttctgttgatgattactctcaatcattcaaacttgtggctctttttctcatcagttatttattgtaactataatatttatcaaattgtattaactaaatacaattatttatcaaacactctttttctcatcagttatttattgtaactagaattagacttataaaacttcaggaatttgaaatcatataacctactatgcagagcacttcatttctccttcctacctctgcttgagctaataactacagtttgtgatccaggcccctccttaaggtggagctgacgtggctgacacttctgtcttagctgaaacaagcagaaggttgtgaatccatgctaaaggtaaacaaactgcaacttatatctgcaatttattttggtatagacaagaggtatgccagtagcacactggtggcttcagaagaaattctcaacacctagctcgccagagagtctatgtatgggattgaacaatctgtaaactaaaggtatgaaaaaatttgtaaaattgggaaggtgagggaaaggtgtgacatttatttttgggtgcagaaacatctaatgcccatgtataaactagggatctggggtgaaaggtgcttctaggggagggtaaattttgagggatggaaagttttagaaaggcagcattcaagcaatctgatgttaaagtttaaagttccaagttaaaagagaacttggaattccggtgcaaagagaaatgttaagatgaatcatggaaaaatactgataaagcctgaaatttttttaagtaagaaatgttttaaaataattcttttcaagcttgagggggtgctagaaagcctgctaaaacagaaaaggaggacatattaatagattggcattaatgaaacagaaaaactaatttgcattcaacaggcactgtaatgatgtggttctcagtgttaatatttgctggagtattttgtgtctgcccttgagtttaagggaatagaacagggaacctgataggtgacaaatagtctggagacttcatctagacacgagcaagcttgcatccttcaggcccttaagctgctcgatttcttaaagatcacagtgggctccatgaattatctgttctgtagaatgtacaagcagatagctaaaagagagcacctgggagataccaagtacagcttgcgggggtgaaggtttatttctgggagttatttatctgaggctaaaaagtaatcatgagccaaaaaaatttcaaatgtttcccatgtttgtttgcttttctgttttgttgtatgtttttgtgcttgtttttgtattgtctcttgtaggatcctaatcatgaaaataagtatgataaattataagtcactattggcactgttgtttatattagcctcctggatcatttttacagttttccagaactccacaaaggtaggaaatgctttatttatgtggtttacagaagcttatttttgcttattacctcatctgttctaggaaaggctaaactacaagacttgtagattataggaggggagtttgaatagctagataccaaacaacatacctgataatcattaagcaatatgtgagaggataaatactgtgtgtgtgttcacacatacacattctttctttgtcacaaataaatgcattgcacctatcttcttcaatgcttagctcatctttttactttctttaagggaacatctgaagaacagaatatctatatttttggttttcatttgtttgtttttaatttttaatttttgtgggtacaaagtaggtgtatgtatttatggggtagatgagatattttgatacaagcatataatacatagtaatcatatcagggtaaatggggtattcattgcctcaagaatttatcctttcttgtgctacaaacaagacaattatactcttttagctatttttaaatgtaaaataaattattggtgattgtagttaccctgttatactatcaaatgctagatcttattcattctgtctaatcatatttttgtactcattaactaaccccacttctcctccatgcccccaccacccttcccagcctctggtagccatcattctactctctaactccatgacttcaattattttaagtattaacttccacaaataaaaacgaacatgcaaagtttgtcttctgtgcctagcttatttcacttaacataatgaccttcagttccatccatgttgttgcaaatgacagaatcttgttctttttataactgaatactactccgttgtgtatatataccatattttctttatgtatttgtctgttgatggacacttaggttgcttacaaatcttggctattgttatcagtgctgcaataaacatgggagttcagatagctcttggatatactgatttcctttattttgggtatatacctagcagtgggattgctggatcatatggtagcctatttttagttttttgagaaacctccaaactgttctctatagtggttgtactaattacattcccaccaacagtgtacaagtgttcccttttctccacatcctcactagcatatgttactatctgtcttttggataaaagccattttaacaggagtgagattatattacactgtagttttgatttgtgtttctctgatgatcaatgatgttgagcaccttttcatatacttgtttgccatttgcatatcttctagtaagtgtctattcagatcttttgcccaatttttaattggattgttaaatatttttgctatagagttggttgagttccttgaatactctggatagtaatcccctgtcagatggatagtttgcaaacattttctcccattctgtaggttaactcttcactcacttgattgcttcctttgctgtgaagaagtttttagttttatataatcccatttgtctatctttgcttttcttctctgtgcatttgaggtcttatccaaaaatcctctggctacatcagtgtcctgaacagtattccctaggttttcttctagtattttcatactttgggtcatgcatatcagtctttaattcattttgtaactgagttttgtatatggtgagagaaaatggtctaatttcattcttttgcatatggatattcagtttctccagcaccatctattttaaatacttttgttcccccattgtatgtttttgatgactttgtcaaaaatccagatggctgtaaatatgtggattcatttctgtgttctctattctgttccattggtgtatgtgactatatttatgccagtataacactgtttactataactttgtagtatattttgaagtcaggtaatatactgccttcagctttgttctttttgctcagaattgctttggctattctggatcttctttgtttccttacagattttagaattgtttttctatttcgatgaagaatattattggtattttgatagggtttgccttgaatctgtagattgcttttagtagtctgaacattttaacatttattcttctaacccattaacatggaatatctattttgtgtgtgtgtgtgtgagtgtgtgtgtgtgtgttctccaatttcttgcatcaatgttttgtagttttcattgtagagatctttcacctctttagatcaatttattcctagggtttttgtagctactgtaaatgaaattgcttttttgatattttttcaggttgtttggtattggtgtatagaaatgttactgatgtttttatgttgattttgtatcctgcaactttactgagtttttaaaatcagttctgacagtttttcactgaagtctatggagtgttctaaatataagtttatgtggtctgcaaacagggacaatttaatttccttctttccaacttgtatgccctttatttatttctctgacttaattgctctggctaggacttccaatactatgttgaataaaactggaaaaagtgttcaaaaatatcttgttccagatctcagaaggcttttgactttttcacattgaatgtgatgttagctgtggatttgttatacatgttttttattgttttgaggtacatttcttccatgcctaatttgttgagatatttttatctgaagcaaagttgaatgttatcaagtgtcttttctattgagatgattatatgatttttgttgaatgagaaggggccacctgacaaatggactttcaaaaaattagggacataatataccctggtcaatatctcagataatccttgcatcaagggctgtcagtccagacatctcctgttcacctacagatttgtaggccactacttttagcaaacatcatacaggggcctggaattccatgagggggcatggaatttattgttttgaggtatatttggtgaaggattttaaggactttccattggctggaggctggaaagtacagcttgccatattctgactgtagtcatcctgagggctggaaagtataccctcgagaaatggcccattctatttttgcaggggagtactgaggcttaatttcttttatgaagccttcccaggttagaggggcttcaagttgatgtcatgaggctttcttgctgctgacttggctgcctgatctgctaacttgtttccttcagctatttcatttgttcccttctgatgtcccttacaatgcattactgctacctctcatggaaggaaaactgaggataataacctgttaatttcctggtggtaatttatagtagattcattagtagtaagaaagtgtctttccttccaaatggtagcatgagcatggagaattaagaaagcatacttggagtcaatgtaaatgttagctacctttcccttgcttaattcaagtgctcttgtaagagctgtcagttcagctagttgagcacttgtgcctggatagagaggtgcactttcaataacatcattcagagtgactactggatattctgccttatggacttcttgctctacaaaagaactgccatctgtgaagatggtccagtctggattttccaggggagtttccctgagatcctccctggcttcatagatctgtaccacaacttgctcacagtcatgttcaggttccccagttttcttggggaggaaagtggctgggtttaggcaagaacaagtttttaacagaactgctgacccttctaacagcagagcctgatatttaaggagccaacggactgttagccaaaggttccccataaaagacagcaatcctgctacattgtgtggggcataaacagttaaaccatttcccagggttaatttgatgacctccagtaccagtagggccaatatggcaattgctcagaggcatgctggccatcctttacctgcaaatcaagtttcttactcaggtagcccactagttgttgagctggtcctcaggcctgaattaaaattcccatgcccattcctttcctttctgatacataaagattgaaggccctccctacagaggggctgagggctggtaccttaagtaaggcttgctttcactggctaaaggccttttgagctttaggtttccaggttaggagatgaattttatccacttgagtttcttttatgaagtgatatagaggatgatctatctcaccatacccaggtatccatagcctgcaaaatcctgtaatgccccaaaatcttgtcagttgcttgaggattttagggagggggaaggaggaaatgggcttaattctttcttcccctaatgctctggtcctttcagaagcactaaaccaaggtactttaccaaggttttgcaaagctgggccttagattttgaaatcttatatgctctgtcagctaagaaattaaaaagagtttcagtgccttcccaagaggtttcctcagttggggcacagagcagtatatcatccacatattgcaagaccctgacctgaggatgggaaaactcagagaggtcctttgacaatgcctgtccaaacaaatgagggattatctcaaaatccctgaggcagcaccatccattttaactgggcagtttggccagaagcattcttcaaaggcaaacaggtattgagagtcaggatgtaacagtatgcagaaaaaggcatcctttaaatctaagactgtaaaccatttagttccctcaggcatttggattagcaaggtatagggattaggtactaccagatggattgagactatggcctcattaatgaatctccattctgcattgggtttttgtgctcctaatattggggtgttgtagggactgttacagggtttaaggaggccctgcatcttcaggttattaataatggcttctagccctttcttaccctctggctttaggggatattgtctccgattaggaaaaaagtgggatcattaggatagatccagactggcatagtggttacaactcaacctattcttccttgagttgcccagacttctggattgatattagcttccactagaggagaaaaagagtttttcctggggctataagtatgctggcccacatgcaagctagaacgtctctacctaataaagaagtgggactttcaggcatgatttaaaaggcacatgtaaataatatgtccccccaactgcacctaaggggttgagaaaaacatatcagagtgtttatgagacaccccacacccctcatgctatgggaaaaggggaggcctcgattatagaggagaaaagaggctggctctggtgtccagaaggaggtccaccttccttccttcagtttccagaattacctgggcctcctgtgctgtaatgggaatttgagccactggagccagggcttgagcaccaggacccatcagtcctgctggaccatctttgagactggttctgaacctgttgaccttcatctctgggggcagtctgatcaccagtggtccccaccacaggctagagagggtcgaggtggcttcttcttgcttcctggatatcctttttaaagtcctctgacttcccacatcaatagcaactcgcagatgcacctcagggatcccagactttgcaagcctgcaaagcagctaccagagcctcagtccttctcttgtgtttcctctctttttcctgggtctcctcctggtccctactataaaagactaaggtggccaccctcaggaggttctccaaaatgctatctggccctatagcctacttctgtagtttccttctaatattgggagctgcctgtgtaataaacttgtcatttaggatgagctgtccctctactgaatcaggggacaagaaggtgtgttttattagtgcttctttcagcctttccataaaggctgtgggattcttacctggattttggtctaccatggacagtttagagtagttaagaggtttggccttagttcttcataggccccccaatatgcacattaaaaagtgtttccttttctattcatctgtgatgtcactggggttccaaacaaggttgtcaagaggtagtgcctctcttcgtattgggaatgatggctcccctatttcttcattttctctatattcttttttcccttttggcctactataggagacatattgctcatctttgaatttctcccctgcctgcagagctgcctgtttttcagctgcagttagggtttggcttaggagcagcataacatccctccatgagaggttagacacctgagttaaattttggaaagcttttatatacttatcagggtcatcagaaaattggcctaagtctccctttatttgtctaagatcctgcaataagaagggaaccctagtgacatcacctccattgagcatttcctgtaaggataagagtgaagctaggggagtggggagttttggagatggtggagctaaaggacctgatggcacagctggagggggccccagagagggaggacaagaagggcctggacactcaatagctgcctcagatagttccctggaggttgcttctctagttttggggaatcattccctttgggccctcctgatatgactgctgaaagagctgagctgattgtgcaatgcttgcaaagttctgggttgtctcacagggcaaagaaagcctgtacctaagagacctctgaccatttgctgtcccatctacagaaaatatctaattgttggatagtattaaaattaaggctcccctctgcaggccaggatggttcaagatggtaagaaggccacacccttatgcaaaagaaaatgagccactttttcttcagtctcagggtcaaaggaatcccagtgcttcagaaagcactccagaggagtgcagaccaaagatggtctgttattcatctagaaagagaagcaagaaaaaaggtgtccctttagtcaccttcgtttcctttggaaaggcctagggtggaggggaagacagtgggggcatccccccaactgttttccctccttggcgccctgagccctggcatcttttaaggtgccatccattgatgcaagcataacccatagcaatgaaaccagaggaaccaatggattgggattagtcatgctcacccatgtgactctagtcctttgctggtgatttccctttgactttctagacttgtgtgatctgcatgactctccaatagatggatcttgagagagacttcgttacagttacatttgggtaatgccctttaatagagaatgcaggtttgagctgtacaatttgctattatgtcctgtactaaagtatttattcttaggcagtggctctggttaacttccggaattaaattcctcttactatttaagtaccattttaattggaggcagaataggtgccttaaaagaacgtaggaaccaaatggttgttttcctgctgatgggaccatgttcagactaaaatttggttttggaggacctttttcccctcattgttgaagacagagttttcttgttcaaagaaggagcataaagcctggtctcttgtagaggggcaaaaaaagcgagaattaggaagttaagagtgtttccgcaaagggccaacaatatgcctcatggaatagggttcccgttccactaggtgatgctgttgaccttgaaataccatgtgctctccagaccaagggtaaagagagagatgttcacagggggtgtggggagggaaggaggacctctgtgcctagaaaatcacaaaaacggcaatcccatgagctatattcccaggcattatggcatttccttatcttgcctaagaggattacttcaccgaactgtaaaaatttttaaagcattgcatacagagagtggataggagacatggaagttgcggataggaaaggagaaaatttgcaatagaaaaagcttgcagatcctgttgccatcacccatcaggctgttggaggctggaattagtccagaaaccttcaggtaacaccagggtgtctccctggcaaggaaccttcagtgcctctcaacctcttccagccccacatgacagcaaggctctctgtaaaaggaaaccaattagaaacaaagccaacattcccagcaccctgaggacatggggggattagctaagttctccctggcaagcctgtcccctgagtcttgtaaggctggtagccacgctaactttttaaatggctgattgggggcccagtatttggtttgatttttaaatggagagcagaaggccttgaaataaaaagaaggagttggggtccacttctatactcccccttctatgaatcttcctcggatcccaggtgggctcccataatgaaatggcatttttcatctgggataatacccgaggttcattgtctctctccaaggaaatcaaggacatggacatacaaggagtgagtttaagagcagaggtttaacaggcaaaagaaagagaaaagctctcttctgtagagacaggggatttaagtgggtcttttggtccacagtgaagtgcaggagattttatagatgagcttgaggaggtagtgtctgatttacacagggcaaaaaagattggtcaccccaggtgtaacatttgcatagcacacaaagaactggttaggactcggtgtgccatttgcatagcatatgaagaagctggctgtcccactctaatctttcattatgcagatgggttctctacctggccagctccatgttgcctgcttttttactgtacacatggtgacaaagaaaagggaagatggagcctccatgttgaacatgcctggccctcaggtagcccttttctattgacacagccgccagcattcacccatgcaagttttcagctggcttatctatgtttgcagcttgatttttcaggctgctctttgttagaaaagaaatgatttgggggctcctttttgttaaaaagggaagccttgccaaggactcctttaccctcactgtctacctaaataatttctttctagttcctgtttcatttcctttatatatttaggtgttctaaatgttgaatgtatatacatatatatacacacacacacacacgtacatatatttgtcattttctcttgatgaattgatctctttattattacataatgaccttctttttctctttttacagtttttgacttaaatccaatttatctgatataagcatagtgactcctgctctcttttggtttccatttgcatggaatatctttttccattacttcactttcagtctatgtgtgtccttaaagctgaagtgaatctcttgcagaaggatagagttaggtcttgtttttttaaaatctactcaaccattctgtctttggggtagggagtaatgaaatataccattttattacagagtctcacaaaaataaaaatagtatctcaaaactcccccaattctgcaggtggaggatggcaggagactagactaccatcctccacctgcagaactgggggaagacagatggcaggcagtgtgagttttttggctcacttgaggccagtgagaaggtatgagaatggaaccaatctaaaaatggctgatgttacttaggagctgaaaagaacagggcaaccttgaagacccagacaccccttttagaaggtgcaataaaggcacctttccaaagctactaagcaggcacttggcatttcaggattttgtcttctgtttgcacaaaagtattcccttcacccagacctggcgccttttatgcttcagagttaagacctgcagagggataggtggcaaggcatttcctagaagagatcacccagcacagctgccctgggctcagggtcttaatttctgtctagtccctggaactatttatatttaataaattttatatgaatacctggagaaatagaagacataaaatctgagggtttgggagagaaagattggggactaggcaggaagccagagcaggggaggttccctcaggccagcttgacctgctccttgacctctttggctcctggcttctcctccttcatttttctcctcttctgtgacatttcttcatctctgagtctctctttttcatcctgttttaatcctcttggcttttttgaagatgggagagatcttgcagccacgctctccctcctcatcagagtcgaagaactcttcctcacaggtaattcatctgtcagagaaacggatggagatgagcttgtcagggtcttcttcattctcatcgccaccctcttgagggacagcatcctcagaatcacctgcatttggactgcaggtggatgggcctgcattactaggttctcaaacagccactgtttaatcttctccaggtactcattagtgttctggttagtcatattggaaggactgatgtagggcttgaaatatggtccaaagtattcaaagtaatcattgtatgaaggctcattagggatctccatatccagagccacagctctttcttatttccagggcactgagcaacattataaatggtgtaaccaccttctgccatcaataacataggcaggttgacactcttgacagattccacacacttggcatgccctttgatgatcagattaaagcaatctaagtgacccctagacaaggcatctgagccatgctgtaagatcaccacactagacaggaacatctctattactttggacatgaccagtttgaaaatggcctcataggactcatcatcaatcccatctaggagcagatagttaatagcataatatctgcctttgccagccccaataacccataagtccccatctcctgggaagtactctccatatttatgaaaggacacagtcctggcctagcctgtaatatagaaggcctcttccatgccatcatcatggtgaatatcaacgtcaacatacaacaccctctggtgatactttagcagttccaaggtggcccagattgtatcattaacataacagaagccagatgccttgaacttctttgcatggtgcaggcctccagcccaattcacagcagtgtccatctgctgctcattaagtttcacagcacttgccacagagccaccagtagacaactgacagaagtcaaacaggccatcaaatgctggacagtcctcactaacgttgaatctctgcatccgcttgctgtgctcagacacgtaatctggatagatggagcacaagaatttaatgtagtcatcactgtggtacttggtcatctcctcagcattggctttgtgagggtgatgggtttccatttttcagtagaaaccatagttgagcagcaaattatgagtcacgcagattcagtgaggattccttgggtgggcttgtccataatagtaatttccaacacccctatcgtagtagtaacagactttcctcctggtgccctgcctttgcgccatcttgctcacttcctgtccctctgtctctcctgtcagtcaatctccattctatgcctttttattggagaatttaaataatattgataatagtatgtaaatcaatattcaaaatcacaataagtaaaaatgactaggaacatgttaatttcatagcatgttacacttcctgtcatttcagttcagatatgctctaaatttatccatctcatgtcacatttgctgtcatttcaggtttggtctgctctaaacttatccatctccctccattactggaacaactccacaaagtccttattccctaaaacaccactgatatcattaaagccactaacagagactgaactcagaataaaggaaatcatagagaaactagatcagcagatcccacccagacctttcacccacgtgaacaccaccaccagcgccacacatagcacagccaccatcctcaaccctcgagatacgtactgcaggggagaccagctgcacatcctgctggaggtgagggaccacttgggacgcaggaagcaatatggcggggatttcctgagggccaggatgtcttccccagcgctgatggcaggtgcttcaggaaaggtgactgacttcaacaacggcacctacctggtcagcttcactctgttctgggagggccaggtctctctgtctctgctgctcatccaccccagtgaaggggtgtcagctctctggagtgcaaggaaccaaggctatgacagggtgatcttcactggccagtttgtcaatggcacttcccaagtccactctgaatgtggcctgatcctaaacacaaatgctgaattgtgccagtacctggacaacagagaccaagaaggcttctactgtgtgaggcctcaacacatgccctgtgctgcactcactcacatgtattctaagaacaagaaagtttcttatcttagcaaacaagaaaagagcctctttgaaaggtaaaaataattacttcttgagactacctgtgcaaatattgtgatttggcctatatactgatccaaagaaaagtcttgtgagtgtattaattttgggtgtctttagtaagagcctttggggaaaggatctgtgaattcatttagagacagtgcccattctctagtaatccacaaactttttgaacatttaattcttatcaatgggaaaaaaatatatacagaataaaaactagaagaaaatgagaaatgcacatgtgtgtatgtgtgtgtgctctaatacattatttctgcaactcaacaaattctcttgcataccttctgggtaactgtatcccatagcctaataggcaaagaaatggaaatttactaaatggcctgaaactgtaggcataataattgacttatctctaagaaataactgaggcactggataatctagtttctgtatgtttcctgatttgaggccacctacagattaatttctgtatttgtgtctttaaggtcaaatgtgggtgtagagattatggaaaaattcaatacaattagtgtctccaaatgcaacagtaagtactcctgtgtttggtgggtggtgcctagttctagacccatttaaagggtttcttctttctactggatttgttcactgtttcagtcctatcagcactctgttcatctggcttatctaaggttggccaagacaccagttacctaggtgagtgaataattcaatcactggaatatcataagcctattttagtaactgtaactctcatcatcagtctatttgtcagtcagtgaattccctgcccattttatacaacaacctttaaacgttaactctttcccaattctatacccacttctttacctcaccacaacacctctcttcataccactcccatcacctcttcccatatcaccactagcccatcaccatctagaggtttccaacctgccatctgagtgtcagtttattataacccctccctcttgatctttgccacctttcaaacaattgttagcataaaaaatagaacttgcacacttatatttactaatttctctccaatttctttgaatccaaatagcctaggaaattcttatctaaaacgactcaaggcaagagcttttatgtctctgcaagttcagcattaaaaccttgctaatcataaaaaaagaaagaaagccttgctaatcactaataaacctatttacactgaagtgtaaatatgtacctagatgtagaaatgttatttttaccacacatacatgagtacactcatcccacttattaaaatattaaactacttctctcagttgattaataatcaaacctgccacgggctcctcaccattgtggctacctcaacctgtggattcccagactcttctaaaccagtgactgaggggttcatctttggcccatcttggacctctaagacactctccagcctatagctatattcatttggattggtcagttcccaagccaaactagttgttaatattttttatatcacctttatttaactcaaaggatttatattttgatggtgtcatttaagacacagtgtgacaaacttaggggtaaagtgagctaaaatgataggataattgagcttccattcctatgcaagaattgatgactttagtttcatagaaaagctggaaaatacttaaattttcctccagaaagccattttttttctgggaagaaacatatactcttataacgaacattaatgaacattatttaggaaattcacatcagagaaaaatttttattaaaaaaacagctgttccattaagagaatacttcagtaatactttttccaccattaccaccaccttaccccctcttaggatacttagaggatagaaggctcttaatacatactgacgggtaatttgatgttttggaagatcctatctcattgattctttggcagaagaaacagttgcaatgaaagagaaatgcaagtttggaatgacatccacaatccccagtgggcatgtctggagaaacacatggaatcctgtctcctgtagtttggctacagtcaaaatgaaggaatgcctgagaggaaaactcatatacctaatgggagattccacgatccgccagtggatggaatacttcaaagccagtatcaacagtatgcctcagtctaagctataattcttacccctttcagaaacttcttttccatttcaaaggggagaagggaatatgggaaattcctctttttttcatattcttcaatcacaacacaccaaaatttttcacaaggcattgttatccttcctttaaaaaaacaatacagctatctaactggaaggaaagcagtgtagaaaaaggtttattacatccctatctctgcagaattcacacttcagtatgtacccagtaggctccaaaaactattgatggaaccaaagataatgtaagatattaaattgtccagcttctagaaccagcaaaatgattaagggtatgattctagaaccagacaacctgggttcaaaacctgacttctctacctcctatctgggtgactttgaacaagttacataaccattccatccctcagttttctcatctgtcaactgaagatgaaaagagtttctacctagtaaaatgaggtaatgcatacagtgcatttagaatattgtttcttacataacttctctttggtgtaaggtatcattactgtcatcattacctaagagaacagatgtcagaagtgaggtagactttgcatcaggtagacacaagtaaagcatgggcttggggtctaacagatctaggctatgctacttagaaacaatgactttgggcatgttatttattttccctgcctggtgtttctcaccaatcaaccaggaataataatagtgatatagtttgactgattgtcccctccaaatctcatgttgaaacatgatctccaacactggaggtgggacctagtgggaagtgtttgggtcacggaggtggatctctcatgactggcttggtgccctccccatggtaatgagtgagttctcgctctgtcagttcatgtgagaactggttgtttaaaagagcctggcatctctcttgctccctctctcaccatgtgacacactggctccccttcccttccgccatgactaaaagcttcccggcctcaccagatgctgaacagatgccgatgccatgcttgtacagcctgcaagaaccatcagccaaataagcctcctttccttataaattacccagcctcaggtattcctttatagcaatgcaaacagactaatacaagtacaagtctgtatagaagattaaatgaagtaatggatataaagtgtttaacacattgcaaggcatagtggcacacagaaagtgcccaaaaaaacaacagccattgcaattgttatcattacttaatttaagggtcagggataaaacccagttgctaaaatcctagttcagttgctctatttactaaaccaagagcgcaccagtaatagctcagaatttgctagtagaccttagccatctcacctacaaaaccattattgtctacccctctatgaccccggatcctggctctcatcactgagagaattgcagtagctgtggctccatcctggccttcctaaaatgaggccactcatgatctcaaacttagaaggaaagttgatccaatgaaagtgggaaaattggtagggccttagttctaagttataagaaaaattctcaatggaaggaagagctttaaattgtgatctctggtaaatgactaaactcctagggaaacctcaattacctcatctacaaaattcagggtctagtaacagcctttagcatcacattctgtaacagtgattctcttgggtcatataaaggactgagttatggagttacctaccctcttcgactcatcttttaatttgtcatagaaaaacaactgttgtacattgtgttaaaagttaaattctatggccagagtgtgatttggaaaagaaaactgaagtaagttggaagcagagtgaagaaaataactctgccattttcttccaactcaccctacagcatctctgttttccagcctcactgggttaagtcttcaaatgtagccctttgcttctaagacaatcccatgttacaaagcatcaataatcctcctctgaacattttcctcaaaagttctaactacaaagcagttagccctgatgttctgataaaagtctaattaatgtgatgaaaatggaagaacttcattttattctattcatgtgtcaattaaatatacatgagaggatccttgaggtgaatggatagatcagtccaaataaatgctttgtatatcgtaaagggttccacaaatgactagtaatacttattattatagatatggcacttaatattatcccaagcatatgtgaaggaaacacagaagtacagaatataatttcagtcttgagggaatttaaagagtggctggggaaatagggtttacttgttttttatgtaaagaccaattagtaccttcctctagcctcaaatgagcttagtctacaatcaacaaaatgtacaaaaataatatctacaaaactgaccacataatcctccaaggaagttacctcactacctttccatccccactccattagattccacatgattctataaggtggcgtgcacgtaatctttcacatttacataacacttttttaatttttaagttttttatttcaataggtttttggggaaccggtggtgtttggttacatggataagttctttagtggtgatttctgagattttgatgcacccatcgcccgagcagtgtacactgtgcccaatgtatagtcttttatccctcgccaacgctgaccctttcctccgagtcctcaaagtccactgtatcattcttaagcctttgcgtcctcatagcttagttcccacatatgagtgagaacatacgatgcttggttttccattcctgagttacttcacttagaataatagcctcccattccatccaggttgctgcacatgccattctttcattccttttcatggctgagtagtattccacagtgtgtgtgtataacattttatatatatatatatatatgacacatatatatttatgacattatatatatataactttatatatatgtgtatatatataactttatatatatatgtatatatataactttatatatatatatgtatatatatataactttatatatatatatgtatatatatatatatataactttatatatatatatgtatatatatatatataaacatcttctttatccactcattgattaatgggcatttgggctggttccttatttttgcaattgcaaattgtgctgctagaaacatgtgtgtacaagtatttttttcgtataatgacttttcttcctctgggtagataccaagaagcaggattgctggatcaaatggtagatctgtttttagttctttaaggaatctccacattgtttttcttagtggttacactagtttacattcccaccaacagtgtaaaagtgttccctttttactgcatccacaccaacattattgattttttttgaatatggcctttcttacaggactgaggtggtatcacattgtggttttgatttgcatttccctgatagtgatattgagcatttttccatatgtttgttcaccatctgtatatcttctttggagaattgtctattcatgtctatagcccactttttgatgggactttttttttcttgctgatttctttgagttctttgtagattctggatatgagccctttgttgactgtataaattgtgaaggttttctcccactctgtgagttgtctgttaactctgctgattatatctttagctatgcagaagtttttagtttaattaagtcccatccatttatgtttgtttttgttgcatttgcttttgggtccttggtcataaagtttttgcctaagccagtgtctagaagggtttttctaatgttatcttctagaatcttcatggcttcaggtcttaaatttaagtctttgatccatctggagttgatttttgtataaggtaagagatgaggatccactttcattcttttatatgtggcttgccaattatcccagcaccatttgttgaacagggtgttcttcccctactttatgtttttgtttgctttgtcaaagatcagttggctgtaagtattgggctttatttctgggttctgtattctgttccattggtctatgtgcctatttttatgccagtaccatgctgtttcagtgactatggccttatagtatagtttgaagtccagtaatgttatgcctccagatttgttctttttgcttagtcttactttgtctatgtgggctcttttttggttccatatgaattttagaattgttttttctagttctgtgaagaatgatggtggtattttgaagaaaattgcattgaatttgtagattgcttttgacagtactgtcattttcacaatatttattctacccatccatgagcatgtgatgtgtttccatttattcatgtcatctataatttctttgggcggtgttttgtagttttccttgtagaggtctttgacatccttggctaggtattcttaaggtttttattttattttattttattttacagctattgtgaaaggagttgagctcttgatttgattctcggcttggttgctgttggtgtatagcagagctactgatttgtgtatattaattttgtatcctaaaactttgctgaattcatttaccagttctgggagctttttggataagtctttagggttttctaggtatactatcatatcatgagccacagcaacagtttgacttcctctttaccaattcggatgtcctttatttcttccttttgtctgattgctttagctaggacttccagtactatgttgaagataggtggtgagaatgggcattcttgtcttgttccagttctcagagggaatgctttcaacttttccccattcagtattatgttggctaggggtttgttgtagatggcttctattaccttaaggtatgtcccttctatgttgattttgctgagggttttaatcctaatggatgctggattttctcaaatgctttttctgtgtctgctgagacgatgatgtgatttttgtttttaattctatttatatggtgtatcacatttattgacttacgtatgttaagccatccctgcgtccctggtatgaaacccacttgatcatggtggattatctttttgatatgccattggatttggttagctagtattttggtgaggattttagcatctatgttcataagggatgttactggtctgtagttttcttttttgttgtgtccttccctggttgaggtattaggatgatactggctttatagaattatttagggaggattccctctttctctgtcttttggaatagtgtgaataggatttgtttgaatttttctttgaatgtctgacagaaatcagctgtgaatctatcctgaactttttgtgttggcaattttttaactatcatttcaatctcactgtttgttactggtctgttcagagattctatatcttcctggtttaatctaggagggttgtatatttccaggaatttatcccctctaggttttctagtttatgtgcttaaaggtgttcacagtagccttgaataatctttcatatttctgtggtatcagttgtaatatctcctgttttatttctaattgagcttatttggatcttctctcttcttagttaatcttgctaatggtttatcaattttatttatcttttcaaagaaccagctttttgtttcatttatttttgtattacttttgtttcagtttcatttacttctgctctgatcttcattatttttttttctgccaggtttgggtttggattattcttgtttctccagttccatgagctatgacattagtttatctatttgtgccctctcagacttttatgtaggcatttaagtctatgaactttcctcttaacatcacttttgctgtatcccagaggttttgatagcttgtatcactattatggttcagttcaaagaattttttaatttccatcttgattttattgttgactcaatgatcattcaagagcaggttatttaatttccatgtatttgcatggttttgagggttccttttggagctgatttccaattttattccactgtggtctgagagagtacttgatataattttgattttcttaaatttactgagacttgttttgtggcctatcatatgctctatcttggagaatgttccatgtgctgataaatagaatgtatattcttcactttttgggtagaatgttctgtaaatatctgttaagttcatttgttttagggtatagtttaagtccattatttctttgttgactttctgtcttgatgaccagtctagcgctgtcagtggagtgttaaagttccccactattgtattgccatctctcattttttttggtctattagtaatgttttgtaaatttgggagctccagtgttagatgcatatatatttagaattgtggtattttcctgttgaatgttattttatcattatataatgtccctctttgtctttttaaactgctgttgctttaaagtttgttttgtctgatataagaattgctactcctgcttgcttttggtgcccatttgcatggaatatctttttccacccctttaccttaagtttatgtgagttcttatgtgttattaaataggtgactttcctgaagacagcagaaacttggctggtgaattcttacccattcttccattctgtacgttttaagtagagcattcaggtcatttacattcaatattagcattgagatataagatactattctattcattgtgctacttgttgcctaaataccttgtttttcttttcattgcattatttcatgtaggtcctttgagaattatgctttaaggaggttctattttggtgtgctttgataacttgcttcaagatttagagctccttttagtagttattgtagtgcttgctggtactggcaaattctgtcagcatttgtctcgaaaagactatcttttcttcatttacgaagcttagttttgctggatacaaaattcttgactgataatttttttgtttaaggaggctaaaatagaaccccaatcccttctagcttgtagggtttctgctgagaaatcagctgttaatctgataagttttcttttataggttacctgatacctttgcctcacagctcttaagattttttccttcatcttgactttagataatctgattactatgtgcctaggcaatgatctttctgtgatgaatttcccaggtgttctttgagctgcttgtatttggatgtctagatctctagcaaggccagggaaattttcttcgattagtccctcaaatatgttttccagacttttaaatttctcttcttccttgggaataccaattattcttaggttggggcatttagcatactcccaaacttcttggtggctttgttcattttttaaaatcctttttgtctttgatggattgagttaattctaaagccttgtcttctagctctgaggttcttttttctgcttgttcaattctattgctgagaatttccagtgcattttgcatttctctaagtgtatccttgatttccagaaattgtgattgttttttatttatactatctatttcactgaagaattttcctttcatattctgtatcatgtttttaatttaagttggacttcacctttctctggtgcctccttgattagcttaataatcaaccttctaaattatttttcctgcaattcagagatttcttcttggtttagatccattggtggtgaactggtatggtcttttgcaggagttaaagaatcttgttttgtcatattaccagaattggttttggggtttcttctcattttggtagacatgtcagagggaagatctgggattcaagggctgctattcagattcttttgtcccacagggtgctcccttgatgtggtttaatcccccttcccctaggaatggggcttcctgagtctcgcaacccagtggagctactgggctctgggctggtactggagagtgtctgcaaagaatcccataggatgtgacccatcttcaggtcttgcagccttgaataccagcacctgctccagtggagttagcaggggagtgaagtggactctgtgagggtctttggttgtgtttttgtttagtgtgctggttttgtgttcgttggcctccagccagcaggtggcactttcaagagcacatcagctgctgtcctacaggcaggatggaaacttgccctagggacacagtttttcagcatctcagagagcctgcagtggtgatcctgttccttcaaagggtctatggattcttctgactttcctggtatgttcctgtggcagttcttggagcagaagttcatgatgtgagtctccacaggctgctctgtttgtctgagtgagagctgcaagctagtcctgcctcctatccaccatcttaatccaagatgctacgtaacacttttgactgttcaaataattttcaaaaacatcccctcatctaaacctataataaattagacatgattagcttatttaattataccaatcaaatctcttccatctttatatctactcaatcttggtaactatatcctccttttattttgggattgcctatttgttatcagcactgaagtcagtggatctgcatgaatctggaaaattgcaacaccagcttgctgtggatttggataggaacatcaacatccagtggcaaaaatattgttatcccttgataggatcaatgacctattcagtcaaagagatggagtacctcacccgggccattgacagaactggaggagaaaaaaatactgtcattgttatttccctgggccagcatttcagaccctttcccattgatgtttttatccgaagggccctcaatgtccacaaagccattcagcatcttcttctgagaagcccagacactatggttatcatcaaaacagaaaacatcagggagatgtacaatgatgcagaaagatttagtgactttcatggttacattcaatatctcatcataaaggacattttccaggatctcagtgtgagtatcattgatgcctgggatataacaattgcatatggcacaaataatgtacacccacctcaacatgtagtcggaaatcagattaatatattattaaactatatttgttaaataacacaaaagtctgaaattcattcacttaagtaaaaaaatttattgactgtctactagcaggccagatgctgtgtttggctctgaattcccaactagcaagagcagagaatctacattatggctgatccataagccaccaattcagctaaatgagatgtttctaatctgggcttccacttaaaaataaaactaaaaatactcatgaaaagagcctacccttcttgatcagagccatacccctcttcaccaatgggaagtcaagacacctatgggtaaaagttctctctgatgcatgaaaactcagagtgataaagtaattttaaaataaaaatttggagaaagca

SEQ ID NO: 115 - DNA, 6380 bp, Homo sapiens
ctgttataaaggtttcattgcttaagcatataatctagcaaaactgccaagccccctccactccctaaactctaagacttgccagggaagagaacagtggccagtggactgcaggagtaactgcactcagcccagaactccctggaggacacagggaaggttctggaaaggtggcggtacctcacagggagagacgtggtgctccagggcccaacttgctcatgttcagatcctcactctgcaacccaccagccggctgtgagtggctacacaatctctgcctcagtttccctatctgtacatgggttgttcatagcctccacctcagagggtagtaatgatgccaagctcttagaacagtgctcagcatgtgtgcatcctgtgcctactctatgccaagcactacagagagaaaaatgaacaaaatagggagaaatccctgccctcatggagtttacatcggggcagggggcgggggcggcacagagcagacaatcaatacagtgattagcccccagttaggttaggcatttccaatctttgccaataagccacatatttgcccaagttagggtgcatccttcccatgaactttgactgtgacctttgactatggggtgacatcttatagctgtggtgttttgccaaccagcagctcttggtacacaaaatgtgctgctagcaggtgccccggccaaccttgtccttgacccacctgcctgttaagaaaagggtgttgtgttttgcaacagcagtaaaatgggtcaaggtttagtcagttggaagttgtgtcaaaactcactatggttggttgagggctcgaagtctcccagcattcattaacaactatctgttcaatgattatctccctggggcgtgttgcagtgagttggcccaaagcataactgaccctggccgtgatccagagacctgccccctgacgtcagtggcgagcctccctgggtgcagctgaggggcagggctattcttttccacagtatttaaagctgggaggttctgccaccaagcacggccttcccactgggaacacaaacttgctggcgggaagagcccggaaagaaacctgtggatctcccttcgagatcatccaaagagaagaaaggtaagtagagctttgcatttacattttgaaaaattacaaagatgaactcatttttttcctgagagcaataactatttggcaatgcacagccctggcaaaaggccgtcgaatgtgtttgaaggtgtctgttgttgtttttgttcaggacgcttgcgttttctatttcaggtgacctcacattcgtgccccttagcagcactctgcagaaatgcctcctcagctgcaaaacggcctgaacctctcggccaaagttgtccagggaagcctggacagcctaccccaggcagtgagggagtttctcgagaataacgctgagctgtgtcagcctgatcacatccacatctgtgacggctctgaggaggagaatgggcggcttctgggccagatggaggaagagggcatcctcaggcggctgaagaagtatgacaactggtaagctcggcccccgctgcctgtcccagcaccctgcaggcagggctcccctgcgtctcctgggagttggtggagaaaggtgaatgaaggccttcgggtagtttcagactcttgagaagatgaatgcaatggtcagaaccatacagacttgaattttgtgacattagtgggccagcccaagctttaaatgaggtgtgtgcacaaaagctctgccaactagattcctgattaaaaaaaaggcagcccctctcctacagaccaggtcctagtggagtaaatgtccacctggccatgtcttagatggtctgtgtgttcacactgatggactgttgttagcgtgctcagcactctgctaggcatggaaagccacggtactgaaggagatggttcgctgcccgtggtgcttggctgaaaggaagcctgtgatttttgcagctggttggctctcactgaccccagggatgtggccaggatcgaaagcaagacggttatcgtcacccaagagcaaagagacacagtgcccatccccaaaacaggcctcagccagctcggtcgctggatgtcagaggaggattttgagaaagcgttcaatgccaggttcccagggtgcatgaaaggtgagcggaacattgatttgattgggtaaaacagcagagagccttttcttatttacatctatcctaatggtaattcaaacaataatggaagctcccaccacctcagatgtctttcagttccatacatgaagttggcaatgtattgaaaatgcacatccctcttctgcttttacagactgtcttatacaaacgtgaaaactagttccatgcatatgggttttaaatagcttggtgggacccaattgcacatttatgaaaactctttaatttcagcaggctgttcactttccagtggcctcttctaacccagggggctggtgaccagcagggtgtggtggtgttagtggaacaccgtgaaaatgggtctacctgggaaaaaaatgctggtcgtgttcgaagtccaaggtcatttctcaccagtgcccacccatcgcaccctgtaggtcgcaccatgtacgtcatcccattcagcatggggccgctgggctcgcctctgtcaaagatcggcatcgagctgacggattcaccctacgtggtggccagcatgcggatcatgacgcggatgggcacgcccgtcctggaagcagtgggcgatggggagtttgtcaaatgcctccattctgtggggtgccctctgcctttacaaagtaagtgtattatttcagaatcaaaagtcaaaataaaaaagaaagctgaacgcaaaccccagtgagtgcctcggggacccccaagcagggccctggcgcactgacttgggaggggtccttgttcacagagcctttggtcaacaactggccctgcaacccggagctgacgctcatcgcccacctgcctgaccgcagagagatcatctcctttggcagtgggtacggcgggaactcgctgctcgggaagaagtgctttgctctcaggatggccagccggctggccaaggaggaagggtggctggcagagcacatgctggtgagcctgcaggaagccctgatgtgcagatgagaggcctggggggtggcagaaacaaacagcattacagttcccacccgtcagcacacctctctgagcgtgcaggttcccggacagatcgggaaaccccaccagtaatgattagtttacacatatacatcgcttttgaaggcccccaaacaccaggggaccatagagatcctttggacttcatgattctgggagtgtttgtttgcactgatacctgaagaaatagatcttgagggcctacattccaacctctgggctgaagtaccaacctcggggagaaggaaacaaagatcacaataaagaatcttgtccccaacagattctgggtataaccaaccctgagggtgagaagaagtacctggcggccgcatttcccagcgcctgcgggaagaccaacctggccatgatgaaccccagcctccccgggtggaaggttgagtgcgtcggggatgacattgcctggatgaagtttgacgcacaaggtgactcttttagacccaactcttggtaacgattggactcaagcgaatcgttggccttcgaaacatgtcacattctcctcagtccagtgtttggatttttaaactctgttagtccagagttggccaagccttagaaatatggatcctgtaagaattcttcaacttaatattcaatctggattgaaactgggccatatgttgctgtttgtttacatacatacatttgtttaaatggtattggtggaaaattgtggaggaagcaagagtcgtaaacgtatcaaagttgcatatgatgcttggatgaaaagagataaatgcatattctagggagggaaaaaagatttgagaagttggcatagaaattagtccggcaatatataagagtatatgttctgctttgcctggcactcactactgcttctctggtttaaaactctccaggtcatttaagggccatcaacccagaaaatggctttttcggtgtcgctcctgggacttcagtgaagaccaaccccaatgccatcaagaccatccagaagaacacaatctttaccaatgtggccgagaccagcgacgggggcgtttactgggaaggcattgatgagccgctagcttcaggtgtcaccatcacgtcctggaagaataaggagtggagctcagaggatggtgtgtccctgccagaggccttggtgtgccgggctgcagggactgcctgtttgagccaggcactcacgagcctttctctgtcttataggggaaccttgtgcccaccccaactcgaggttctgcacccctgccagccagtgccccatcattgatgctgcctgggagtctccggaaggtgttcccattgaaggcattatctttggaggccgtagacctgctggtgaggctctccttcatttaggctgggaacatgggtgtgctgggtaccgaagggcatctgtgaaatctctccttttccatgaccttgtcagagggtgcccaggggcttcctttcttgagcttccttcccaaagatccagaataattggcaagttcaaatgtagaaccaacccttctggtcacctggaacctttctgaatccctgatctattgtagcttgatcaaattttactttttactttgtggcctcagtcatgtaactttgagttagcagttttctgcaatttagcttggtgaacgcaaaactagctcgattacaaagttattgtcttgccgtgtctttccgtgttgtgaataacaccactggttgtggagtctgaatttcaaagcctctgatgaacatttctctttttttttcctgctaaaggtgtccctctagtctatgaagctctcagctggcaacatggagtctttgtgggggcggccatgagatcagaggccacagcggctgcagaacataaaggtaaatcaaagtcctgatctgaaaccacagagaagtgggattagagcactcttcgtcactcttatgtctctctccttttctgtgtctgtgtgtggggagagagagagagagaaagagagagaggagaacaaagcatgctaatgtcaacaatcaatggcgtcagtcttgcctaggagagcctcatttactaatgaactccctctctgtttaacaggcaaaatcatcatgcatgacccctttgccatgcggcccttctttggctacaacttcggcaaatacctggcccactggcttagcatggcccagcacccagcagccaaactgcccaagatcttccatgtcaactggttccggaaggacaaggaaggcaaattcctctggccaggctttggagagaactccagggtgctggagtggatgttcaaccggatcgatggaaaagccagcaccaagctcacgcccataggctacatccccaaggaggatgccctgaacctgaaaggcctggggcacatcaacatgatggagcttttcagcatctccaaggaattctgggagaaggaggtggaagacatcgagaagtatctggaggatcaagtcaatgccgacctcccctgtgaaatcgagagagagatccttgccttgaagcaaagaataagccagatgtaatcagggcctgagtgctttacctttaaaatcattccctttcccatccataaggtgcagtaggagcaagagagggcaagtgttcccaaattgacgccaccataataatcatcaccacaccgtgagcagatctgaaaggcacactttgatttttttaaggataagaaccacagaacactgggtagtagctaatgaaattgagaagggaaatcttagcatgcctccaaaaattcacatccaatgcatagtttgttcaaatttaaggttactcaggcattgatcttttcagtgttttttcactttagctatgtggattagctagaatgcacaccaaaaaaatacttgagctgtatatatatatgtgtgtgtgtgtgtgtgtgtgtgtgtgtgtgtgtgcatgtatgtgcacatgtgtctgtgtggtatatttgtgtatgtgtatttgtatgtactgttattgaaaatatatttaatacctttggaaaaatcttgggcaagatgacctactagttttccttgaaaaaaagttgctttgttattaatattgtgcttaaattatttttatacaccattgttccttacctttacataattgcaatatttcccccttactacttcttggaaaaaaattacaaaatgaagttttatagaaaagatgg

SEQ ID NO: 116 - DNA, 10285 bp, Homo sapiens
tccccgcctgcaccccttcctatataaacagccactctcgctgtgattatgggggcatacaaggaagatcaggcttccatggaagcttctgcaactgaaatccactggggactttagaaggagcacctgtaagtagcttcaggatggatggggcagagtctgtctcatggtgggtgttaagctggcctcatacaaaagaggagacccatcctgataccatgccaggtacaaagcactgtgtgatttattctaagtgtcttggtaacaggacttgaagccaggtggtgactggaaacctaaaatgcaatatttagtcatagaacattagaaatagaaagaaaataacctcccaaatcatctaatccatcactcagctaaattcatttaattcacatccccaaactacatctccaaatgtacaatggtttcattcctggtttagggattcgaggttttgtgtttgtacaaaatattttaatagtcttataaaataagatgtccaaaacacaataaacttaaaagccaaacacaagcaaagcatgaaacagaggttctgaagagcaactcctcaatacaaatcaaacattgtcctttatctccattgtgactttcagttatgtaggcacatctgcctttttagatacctaaattatacatgaggattgtaaatattctttgtgtgtatgttaggatgaaaaaaacctgccaaggcaggcgcatgggctaaaagaatacactttcctgtttccttttattacctgtttaattaaaaaaaaaaaaaagttgcccctgataaaagcctccaagaaatgcctctagtggtattttctggaattgaattaagcatattaacatattgctatacaaagcggggggcgtggaagtaaggcaaggtggactgtggtgccaatcctagtgacatgtcagcagaggaggagtttcttgcctgtggacttcataaaaggctagctcaacaccctccatgagacacactctgccccaaccatcctgaagctacaggtgctccctcctggaatctccaatggatttcagtcgcagaagcttccacagaagcctgagctcctccttgcaggcccctgtagtcagtacagtgggcatgcagcgcctcgggacgacacccagcgtttatgggggtgctggaggccggggcatccgcatctccaactccagacacacggtgaactatgggagcgatctcacaggcggcggggacctgtttgttggcaatgagaaaatggccatgcagaacctaaatgaccgtctagcgagctacctagaaaaggtgcggaccctggagcagtccaactccaaacttgaagtgcaaatcaagcagtggtacgaaaccaacgccccgagggctggtcgcgactacagtgcatattacagacaaattgaagagctgcgaagtcaggtgagagatgatgcttgtgtttcctactctgtgtttagcttcaagataaatcaagaggttatctatgttaggtaggtccaaatggactttgtaaagcaaattaggctaaaatgttacatctataaaaattctttcatctacctttagtgctggagtacctgactgtacaacaggatgaccttaaatcatgctatttttaatgtttaacacaattacatacaaaatatgaacattttatcctccggaataaaatgaatctttgtcacagcttatcacatcagggctaaatgtatagtgaacaatctttctgaaaagagctaaaaattaattacgtgataaatctctcttagtttttcacctagtccttatcaagttttgaaaccccagtaaattcaaagacttttctccttttatttaagtaaatgttataatatgactattagaatactgtactgcagatttaaatagcaaagtgattctgggtggaaacagtgtggcaggaatatgggtcttaatgatgcctggatttttaagtgccctgtttaataacatgaccatcagcatcaagcagttcagaaactacttctacagtaataaaatgttctattgcccccaattcatgtttattacaatcatatcacaacctcctcctatgtcatcaaaaaaagggtggagctctgtattttatcagtttcatggaataaaagcagaagactttgctcctaattgaaaatttcagatatgacacagagcacttgcttcaaattaaagttcttatctaattaagaaaagtgttcactgtaatttgtgttaagattcatactcctttagagcaaagcgcatttacttaccagcaagtctgtttttcttgagttgtactaaacatcagggcaatttgattcggactccatgggaagttactttggaattttagaaactatgggcatgtgaagcaatggcatttaaatagcccttccggaataaagttcatccttcgcaagctctcactaaaaatgttcgaaccacacctgtctcgtgtttctgactctagtttggttcatctgaaatacacaggcacaggccatccgtcccattgagctggacagtcccaaccataggaagcagccctctccaaaactgggtccattgaaagagaaatgtcattgtaacatcttctgcaagtagatttttcatctatatgcctccatcatgcatttcgttctttcatgcatcatgttctttcattcagccaatactgaatgaacactaactaggtgctgggcaccatgctggggactgaggaatattatggtggacacaatatgatttatgaggatacagggatggacagagggaccagcacacagagggataatgagagcacaggcagatcatccagttcagttttgagagcatctgtgaaggctcctatgaagcaatgttgtcgaacctgagacatgagggaggaatgggagttcaccagaccacaggggctaaaagaaatgtcctaagtagaaacatcaaaggcaaggcactcaataaggtgtgatgactcaagttgagttaaattatccttctgtaaaatcacaagaaagtagaccaaaccctggggcatctagagttgcattttatgactctgttatgttaaataactatgtcattattttttctatatattttcatgtagaaatacttgaaatgaacatcatttttgacataatagtcactgtagctggggataaactaaatccttgtaaactcctatccagttgaaaatgtcattcttggccgggcacggtggctcacgcctgtaatcccagcactttgggaggccgaggcaggcagatcacctgaggtcagaacttcaagaccagcctggccaacatggcaaaatgctgtctctactaaaaatgcaaaaattagccgggcatggtggcggatgcctgtaaccccagctactcgggaggctgaggcaggataattgcttgaacctgggaggcagaggttacagtgagccgagatcgtaccattgcactccagtctgggcaacagagcaagattctgtctcaataaataaataaataaataaataaataaataaataaaaaagaaaatgtcattctttctcatgtattttccagattaaggatgctcaactgcaaaatgctcggtgtgtcctgcaaattgataatgctaaactggctgctgaggacttcagactgaagtaggttccctaatacgtggcaaaagtttctgaaaaagaattcctttagtagtccttccagatactcagctttccatatcattgttgataaaggaagcacggttcaatgtccagaatcctgaagcctaaaggaggttagaagctacatgtatgaagctaacccagcactcagggatggccttctctttcttgatcccccggcatgtaactaaacacctccagtaactactattctccttggttattactggttgctaaatttttttttagtaacctggtatctaaacctaattctgccctttggagtaataacaaagtaatttacaattctccttctccctaagtgcctttctgttatctaaagagagtcttgtgtctacccttggtgattctccaagtaattctccacgttcattcaagtgcctgcaagtgtatgacccaagttccaggggtgactcttgatgatttctggcttgccagtgttttacaggatggtctggccaaccaaagaaccaggaccaatctataataattagctgggcgtgatgccgtatgtctgtaatcccagctactccggaggctgaggcaggagaatcgcttgaacctgggaggcggaggtttcagtgagctgagatcgtgccattgcactgcaacctgggcaacagactgagaccttgtctcaaaaaaaaaaaggaagaaagaaagaaaagaaaaagaaagtaaaaattgtgttcactttctttgtagtcatcacaccacatgtgaccagacctgttccttgcaaacagcttccacactaaggcctcttcatcctgaatttgtacaatgcattaacaccaaaaagccctttgtggttagaagggtagccttttaatgctccaagggattaacaagaaggaaataggaaatcaaatccaaagatgaaagcagtaaaggtgcattacttccaattttacctagcactgagtgtcacattgcagtgtcattttttaaagttggatattttaggaaactgggcagggcatgcatgatggctaacgcctgtaatcccagcactttgagaggctgaggcaggaggctcacttgagtcctggagtttgagaacagcttgggcaacgtggcaaaaccacatctctatacaaaaatacaaaaaaaattagctgggcatggtggcatacatctgctgtcccagctacttgggaggctgaggtgagaggattgcttgagccccaaaggttgaggctgcagtgagccatgatcacaccattgtactccagcctgagtgacagagtgggaccctgtctcaaatacacacacacacacacacacacacacacacacacagtgtgtatgtaagattgtagaggaggatgtagagctgtttgagataattcactttggatgtctctgttcacaaagtaataaaaataaatcgatcatgtacattcattaagtaaaactaaccattatttaatatcaataataagaaccctttgccaacacaataattaacacaatttaatttcttataagataaattctagaatttagaagtgttcaaaattatttcagattgcctttttaccagtcaccccaaattatagagattatattattgagcacattttctgactcctaggttcttatgtaaatttcatgattgtgtaaaggcagacattataaagtattgaaattgatctcctcataagccacatttaaaaacctatcccattatattagattctctccttataatggcttcagaaggaccagttatctctgtacactaattaattcacaggtatgagactgagagaggaatacgtctaacagtggaagctgatctccaaggcctgaataaggtctttgatgacctaaccctacataaaacagatttggagattcaaattgaagaactgaataaagacctagctctcctcaaaaaggagcatcaggaggtgagaaaatattcagaagtggtattggaaacaatggaatggttctatataatactaataataggaggagcgggagaaacaggagaagggggaagagttggtggtgatagtgacagagatgatgacgatgacaataatgatacaagccctaccttcttttcataatgttgttgtaagttaaatgacttagagcagcacctggaccacaataagcccaacacaagttattattttatatcttttttacttattcccaatgaaagaggtcatgagactccttatgtcttttctgcccagccttatctgagaatgtgcttcagactaaaatcaatcagaaatttcactttcataggaagtcgatggcctacacaagcatctgggcaacactgtcaatgtggaggttgatgctgctccaggcctgaaccttggcgtcatcatgaatgaaatgaggcagaagtatgaagtcatggcccagaagaaccttcaagaggccaaagaacagtttgagagacaggtaaccacacaattctaaagggtgagcaaacgtgtagatgctttcctccagaaacagataactcattttctttttcatttgttcattcttcctttctctttctgtcttttctttcttatttccacccctcaactatttttttttcactcttggcactgtagactgcagttctgcagcaacaggtcacagtgaatactgaagaattaaaaggaactgaggttcaactaacggagctgagacgcacctcccagagccttgagatagaactccagtcccatctcagcatggtaaagcatatctaacttctctttctcaatctagtatgtgtttaccaaggtcctctgttaggaactatagaaatgcaaagacctacaagaaataacccttccccttgcagaactggcagggaaacaggccgaacaactgattataattaaaggacagagagaaatcgaggaaagggcaatgtactgcatgaatgcagaggaaagagtaaatctggaagatttcacagggaaagtggcatttaaaccagatcttcttgtaacttttaagttcaggagtacatgtgcagatttatgatgtagttaaacttgtgtcatggggatttgttgtacaggttatttcatcactcaggtattaaacctaatacccattggttatttttcctgatcctctccctcctcctaccctccaccctctgttaggcccccatgtctgctattcccctgtatgtgtccattataccagatctcaaaatctaagataaaattttaagatggagaatggactagagacattccaggccaagcaaatcagcaagcccatgacaaattatgttgtggtaagcagaatccctcaaaccacagtggcctgcagccatgatactacatccaccgtgacatttcctttccaagggcaaggctaaaggggtaggccctacctaggacatgccagtgtcctggcagaaagaaaagagcaatggttggtccacttgatagctcttaaagcttctccttagaaaaggcatttgtcctttgggaggccaaggcaggaggatcatttgaggtcaggaggttgagaccagctggccaatatggtgaaaccccatctctactaaagatacaaaaataagctgggcatggtggtgtgtgcctgtaatcccagctacttgggaggttgaggcaggagaatcgcttgaacccaggaggcagaggttgcagtgagctgcgatcacattactgcactccagcctgggcgacagagcaagactccgtcccaaaaaaaaaaagaaaaagaaaaggcatttgtcagtttgacctgcattttattaaccaaagagagtcacatgacccagccaggtgtcaatggattaaaggaatctaatcctgcaattgagaaatgccacagatcacatggccaggtctgatgaaggagtgagaggtataacatcttcacacagtggggaagcaagtactgagaacaatgctacaatgcgccgcactgaaagaacagtaggtgcaaagctacaagcaaagaaaaaccccaagagctaatgatcctagctggctggctgaggttgcctagttgggaagagtgggagatggagctagaaatatacaccatgcccacagtgatgaactgcagagacccttctcaaaggaaattaaaattaacccatctcttgaatcaagtcctcacataagaagtgccctatttttcttgtgctcatagaaagagtctttggagcacactctagaggagaccaaggcccgttacagcagccagttagccaacctccagtcgctgttgagctctctggaggcccaactgatgcagattcggagtaacatggaacgccagaacaacgaataccatatccttcttgacataaagactcgacttgaacaggaaattgctacttaccgccgccttctggaaggagaagacgtaaagtaaggctcttagaatcaaggaataggtgtcaatatctgtatgcacttctattttaatgtccctgtcactcattacccagcaccaatgcaatccctaggacagaagcaattatactcacacatgcctcaccacgaacaacaaaacgaaaatataccaaaaaatacacacacgcccaaaatatcaagtacagccttgagatcatgtggtaggactgagttctaccacatgatcatttggagataattctccaaatgatatagattatgctgatattaattttcatcattaatatataattgaaggcataataaccttttggaaattctaattgagagctcatgaattagacaataagctgctgaggtccacgggagccagtctgagaatcataagtgtggcagcagcaactgtcttcagataccatacctaagaatatcaacaagagaacacaagatttaaacttccattgtaattttgttattttaattagaggaacttcttagcatatattaaactggtcagttttaaatctatgtatttttcaagttaaaaagtaaaatgctcaagtttgcaataaaagcaatgtaaaagggaaagatatatgaaagcaataacacattcacttggactttgaaatataaaagacaggagtgcattccattttcaaaacagcaataatgcttttttctgtttcttttttcttcttttcattaaaaaaaaaaacagaactacagaatatcagttaagcaccctggaagagagaggtaagttctaaatttttgcacattttctatgacattcagctgctttctattaactacatgccactgataaaaagtaaagtgaggctgttttagtctgttttctgctgctgtgacagaatacctgagactggataatttacaaacaatagacgtttacttggctcacagttctggaggccagaaagtccaatatcaaggtgccggcatcttgtaagggccttcttgctgtgtcatcccatggcagaaagtagaagtgcaaaagagtgtccatgagaaccagagagcaagaggaggctaatctttcttttagaactagcccactctcacaataactaacccattatcatggtaaccacattaatccatccatgagagaagagccctcatcatctaatcaccttttactaggccgcacctcccaacactgttacattggggattaagttttccacacatgaactccagggaacacattcaaaccatagcaaaggccaattctcaagggagcagatatgacaccagggattctaaaaatcttgtacatggcataaagaaaccctccacatgggaacttgggcacactcctcagaatggggtgattttcttggcctgtgctattgctatcttgaaacatcctgacatcctgaaaaggaaaaacaagacaaaatttgaattccacttaaattcaagataatttatttcttgaatttttaagagtaggacatttgtaaatttggggagaagcacattttctgcatctatttataaaatggacttaagattttttgagaaagaggatgggtttaacatatttttctaaaagaaggaaataagtaaaaagaataataatttaaagttgaatattataaatcagcagagtcatgtgcctgaattaacatttaatgtttaatatgaattcagatataaagaaaaccaggaagattaagacagtcgtgcaagaagtagtggatggcaaggtcgtgtcatctgaagtcaaagaggtggaagaaaatatctaaatagctaccagaaggagatgctgctgaggttttgaaagaaatttggctataatcttatctttgctccctgcaagaaatcagccataagaaagcactattaatactctgcagtgattagaaggggtggggtggcgggaatcctatttatcagactctgtaattgaatataaatgttttactcagaggagctgcaaattgcctgcaaaaatgaaatccagtgagcactagaatatttaaaacatcattactgccatctttatcatgaagcacatcaattacaagctgtagaccacctaatatcaatttgtaggtaatgttcctgaaaattgcaatacatttcaattatactaaacctcacaaagtagaggaatccatgtaaattgcaaataaaccactttctaattttttcctgtttctg

SEQ ID NO: 117 - DNA, 18936 bp, Homo sapiens
ataagacccagggctctggctgccttgtgtttctccagggctctatttctctatttttccttccccttctggtgtttggcctataggactctgtagggagagcctgggtcagccctgcacaggtaggatgggcagcatttctgtgggggtttgcagtgaggggtcggggggccatacacgtgtgtgttggggagtgggcttcacttttgtcacaggactgccacgatcatttggggaacacctgggagtcccaaccaggtcatgttttggcatggactaacagatagggaaggaggtgctacttcagctcagcaggtcagcaccgtccttgctatggagccgagcccgggtcctaacaagactctgaggtcagccatgttcaggggagcccagaagcagcgagtctttcatgactctggggagtgaaacaggaagggccacagtcctgccagttcctggagctctgggactggtaaaaggggcttggcaggaggtgtataaggggcatttttgtccaggctaagtaacctagggagtcggaggggattccagagcaactggggatatgagaccaaggactacgacagccactcctgccacctgtgccccatcagatgatgtcaacttcaaatcaagcattgggccaggtattttagagctaataccgggctatatcctctacctgtagatttggtattaccatccctcttttccagatgaaaagaaataggaaggtgacttgccaaaggtcttgcagctagaaagcgacagaacagcatcttcacgcttgacattctgtccctcatcctgaagctgcaacgatggaggattcccaagtaacagagtctccccaaggtcaaaggaaaccaaatggagccagccaggaaggccaaaatgaaaggaaagcaagggatctgtgagagtcacatgaccctggctggccacggtgcctgtgggagagtggccctttaagagcccaggtgtgggtcaaacactgagcagagtttcagttttggcagcagcgtccagtgccctgccagtagctcctagagaggcaggggttaccaactggccagcaggctgtgtccctgaagtcagatcaacgggagagaaggaagtggctaaaagtaagtgttactgctctgggatccccagacgggatgctatctggaaagggctcgggacgatggctcaggtaaccccctccattcccaactcccagtctcctagatagtggggtgacaaggacaaggaggcagactgtgtgactgtgtgtggctggggagtaagcgtgcatatcgcagtgggacgagtagggatgcacgtgtgtggaagccccccatccttttctgagaaatatcagcaggtgggaagggacctctgtggtcagcatatgtaattctactctttcagcttggtctgtgcctggatttcctaactcctcatagttgattaactgtgtggccttagacaagccacctaacctctctgatcctcagtttcttaatctgtaaaacaaagatagaaataacacctatcattcagggtcaatgtgggttcaaatgagaaaacacaggtgaaatagctttgtaacctctagaatgaaataggaattgtttcatatttttcagtttagtttaattaatcaaggatttattgaacaccaacagacctggaattagatagtgcgcataaagtatggcacctagcaagtcctcttccattctttgaggtttcccacttgtggctttctggcaaaggcatgttcagctccttttttctgggcttccaagaacctctgaaatcctttgcaattccacctcgctttgctctagcagattcctgccatgggagacataaatgtgtgtcatcgcatcatcctgcccttcctagaggtagaaaaaaagaggtcctcacgggatcactgagtgaggtggagctgagccccacaggcagcatgatcaactcctgctgttcctcctggctctgcagccagcagatctcagacatgggcttcccctccctttgcccatcctgacagcagcccaagccagcagtgggaccgtccggcacaagggcagcagcgggtcaagctccatccctgacccccagttccctttgtgcaattgccacagtgcctggggccattgaagctgctcctattttgtgccatcactttcccccttcactaggggaattatagatcctttaacatctggagaggagatgccaatttcaggggtttaggtagaaggcagctgtctggtgcctggacataggtcttcccagagccagatctggaattctctctccatccttgtcccgcccctggatgtgctaaagtagcagaaagaacactgagccaggagtcaggaaagcaactctctctgcttatctcctagtgccgctagacctctgtggctttaggtgataaaaaatggggtcacacaggcttccatttagtaaacccacttgccctgggctttcacaccttcgtctcattctcccttgataccaacgaggaggtaggcagggttggttttgtgatgtcattccctagttgaggaaaccaagacaccgtgagtctatgtgagtggtgtgaagtcaccagcaagtttgaacgatgaggttttggtacagccattttgatatggtcatgaggacattttgatgtcacctaaaaagcaaactatccaacttaaaaaaaaatacctatgcattgtgctcagcagagaccttcatctatgtcttgccctctctctggaggggctggggctggagtcccaatgtcactggcatcgacacagtatggtggagtggaaagaggctttggcgtcaacatgcctggttatacccatggttatgtaacatatcctacacatggtaggtgctaaataaatagcagctaatattttccaggaagaaatttctctgttggcacctacctctgggtccaggtgtctcttcattttttaattttttatttttttgagatggaatcttgccctgtcacccaggctggaatgcagtggcgtgatcttggcttactgcaacctccacctcctgggttccagcgattctcctacctcagcctcctgagtagctgggattacagacccatgccaccacacccagctaacttttgcacttttagtacagatggggttttaccatgttggccaggctggtcttgaactcctgacctcatgatccacccacctcagcctcccaaggtgctgggattacaggcgtgagccactacgcccggccccaggtgtctccttataagaactgccttttccgtgaaaggcagagaggaaagaactgaacaaattctcagttcgctaagattgaatatcctgcttcttcctctctccactgcttcctctcaataggaagaccctctgaggtaaagcagagtggctaagggcctatgctcttgatctagaatcccatctaagtcacttaccaactgtgcaaccttgggcaaatgtctcacctctctgtgcctcaattatctcactcatgaaatggggttgcccattttgtcccatctcctatggtggctgtaaaaatggaacacattaacacatgtaaagcacctggaaaggactcagcgtacgttcttctagcctagcccatagtgcttgtctcctctcttatccacatgagtccaacctaagtagctcactctccatctctctatcttcaaaggatgtccagcaagcagacttctactctcataccaagtccaggggacctttcttcctctgaaaaagagggaaacctgagattagatggacaaaggtttggactccacaccatgagagatgaagtgcagtcactttaactgaacaggagctagttaaatacattttataaaaagaaaaactatccttcagcacagcttacactcctgccccaatccacaattgtggggacatatgttacacatatgttgggatactaacttagtaaactgaaaatgatctagcacatcctagcctcagcagtgaaaaaacaactgctagtttaaggaccagaaaacgtgccctcatgcatgatataatatcatatatataaaacccaataaagcaggtccctttgctcatttaaagagtgataatggggtagtgacctcaaattaggattctgctgtgggtcttggggtcgagaatccctataacccttagatttccaacctgtgtcatgaggataacaacatctatctcttgggttgttgtgctgatggatgaagtcttacaagaaaagaacctagcaaagcatttggcacgtagcaggtgcccaacattatgttctttttcttccttccttaagcaaatcctttaaatccagccccagccaccctgggctggggaggtctcccgagatttgaatccccaggtttggaagaaagtctctggttttgagaggaaggggtctgtaatgattctgaaagctcgaggtcctttcaaatgctactagagaaattgtgcttcaagttttagctttgggcaaagaagagctcctgttcctgaaagcaggggtatcctctcctgccaatcatcccatctaggactggactgtgtgcatcccgctgatgttgccatctgcccgacctgcctgtgcatgcctgatgctctcatccctggcttgagaccatgcagagggtaatgggtgcacacacatgtcccctctctacacaaacatgcacagccacccaaacatgtcacaaaatgagaagtctgggacagaggtcagggtggtcttcaccttggagaagctggcatctgactctctgcaacccaggccaagtccagaggagggctgcatcccccagctcagcttgtgggaagaccactcctgtctcacgcaaatatgaggcagcttgcttatctagaggtgaggacaggaacaagaagcaaggacagctgctgctggtgtgggttcttaaaagcaggcagcattttgtcctcccacctgtgactgcacccaccctgtgccagcacaagtagaaaatggtagatctcccaggactttgcagccagcccatcccaactgtttctgagacttcctggcctcctgaaagctgctcccacctgggagcatctcccatggcagcttgcagtgcccacgcaggtgatgacatcccagctagtgtcccctgattgcttccatgttggagctgactggtatttggccaaggccccactccaggcattaatcattgacctggtaagaaaggtctggggcaattaaccggactcaagagagcctcaacgttgccatctgacacccatatttgttcccactccctccctttattcttccaaagaactgcagaaacaaaatacctttatattcacaaggaaataaaaggttccttgctgggaaattcccctgcaacaaagaaataaccaagataaacaactctattgcctttggctcaagctggtgaagggagtctgggagcaggagcaggggccagggtggtgagggaggtctgggagataacgcccagcttcctcctgcttacagcgtccttatctttatgggcactcattactgcccaaacttacgatcatttaacactctctttgtcaagacaactccaaagtttaaagtctgtcaaagtctgggaaagtggagacttctgtctcctcctctaggctgtagttggggtcttgatgacagctgctgtcaggcagacccctgggaccctcaactctcctcagccctgggctgtgtccacggtggagacaaagtccacacaggctgctccgtctgagtggtctcatcttcgattcttcatctttgtctgccaggccttaccaggcaggattacaaagaccctaacacctaagcttttaaccccaattccataaccaagttgctgggaaaacgtaagcctatcattcagcatctcaagacctcaatgttttatccataaaatggttgtgattatacccgtctgtcttatttcaagggaacatataaagctcaaatgaaataatgtaaatggtagtgctttcataagcaacagggtctctacaaataacacaaataagcataaggtaaaagcatgctcttgtatttggggtgcgatacagtagtggagaggttaagcacatggactttgcagtcagacaaaggtgggcccaaatcttccccgacccccattctgtgtacccccacacatttaaccccatgtgcccttgaggaaagtacttaaccttgaagccttcatttcctcccatgtgaatgtggataaggatactaacctcacagggctgatatcaagtctgtatgagatagtacacataaattattcaacacagtgcctgagacagaataagggagcaatcaatggggttaggaccatcatcattacatttacagccttaataatcatgacacctcctctgtgggtctcagtttcctcatctgaacacactgtgaaatatgtcagcccgcttcacctcccaggaatgtagggagggcagctgaaacagagagatgggggccacgtattggtaggaaccaatcacccagcaagccattcctgagatcttacggtgtgcctgggactgtgtctcatgggcagggaaacagagcaaatgacacaatatctctatcccaaaggagcttgcagcttagttgagaagacaaaagctacttctagctattaaggatatacaagtgttgaaggatgataagactttgaattgttatggaaaaagtggaggcactgattcattcaacaggatttatgtcagttgctggagatacaaagccaaatagatgtcacagaaactctaaggtcaactagtcttggaagacaaggggcgcttcatctccttgtgattattgtttttcagcattgcacaggagaagtcggcctgagtggtgcggcgctcgggacccaccagcaatgctgctcttcgtgctcacctgcctgctggcggtcttcccaggtgtgtctgccaggccccaactctccaagctccaccccttcagcctgcccgactccagggttcacctccctggggacactaaaatcagactcatccccagggatgtccctctcaaagttggcacttccttgaggaagagtcatacagagaagacactgaaaggccacatctgtgagcattggaagtcagggacaggaatggcacttcctaatctcaaggccaggggtctgtgaaagatcttctttgagaataacaaagaccttaacttcaaccaagcatctctatgacccgctgtgaaatctgagggaagtcacttatcctttctggctctcaatatttttatctgggggaaaaaaaagaaaagaaaatcatctacaaagtgcttttagaaatataaggaaataacacatggcaagtgcaaacatgtaacaccttacgaaagtggtgttattgtttgaaaaaacaatggatggctggatgctggctcacagctgtaatgccagcactttgggaggccaaggagggtggattgcttgaggtcagtagctcaagaccagcctggccaacatggagaaaccttgtctctactaaatagaaaccaaaattagctagcatgcacctgtagtcccaactacttgggaggctgaggcatgagaatcgcttgaacctgggaagcggaggttgcagtgagccgagatcgtgccactgcacaccagcctgggcgacagagagagactttgtctcaaaacaataaaaatatataaaataaaaaacaagggttatcataaatttgtcattcccttgtccttgaaatggttatcattaatgaataacaattccaatttaatcatgattaaaacagtcactttatttaatctcagcaattttccagctgtgatatatgataaattatcaacacagggcctacgtgtcaggtagaaaaccacatctactcatagtgggttatctggaacaggctttacctcccaagggcctcagaaagcctctctcttctgttcccacagccatctccacgaagagtcccatatttggtcccgaggaggtgaatagtgtggaaggtaactcagtgtccatcacgtgctactacccacccacctctgtcaaccggcacacccggaagtactggtgccggcagggagctagaggtggctgcataaccctcatctcctcggagggctacgtctccagcaaatatgcaggcagggctaacctcaccaacttcccggagaacggcacatttgtggtgaacattgcccagctgagccaggatgactccgggcgctacaagtgtggcctgggcatcaatagccgaggcctgtcctttgatgtcagcctggaggtcagccagggtaaggatccaagctccttgggcttctgggggaaagttagagggaattctctaaggtgcatggagggcttgaggaggaacttcctgacaaggatgtgtagccgggttgggggtcagaaggcacccctttccccaggcaaagacttctttaacaggagaaggagacagatagggcctacttgggggtgatgagtgaacccttctaggacttggtggcctataacattttaggctttctggagaccccagcttagaagggtatcagaaggacaagttttctggtgtttgctacaggtagaaagggaaatctgacatcaggctaaggagatagaaaaggtagggagagatttacagggatccttaaattcctatcattaatgcacctttccatcaaggtttgggccgccaaaaggcttcttgtaaaatgcatattttttttttaacctgggaacccttagtcttttggtattatcagggtaaattagattattagatcttgaccaaagaccaagatcctgaaaggatgggttgctaacaagcctattctagttggagaaagagaaaaaaagaaaagctctttctgacaagggtttaacaatgaggctgttttagatagtcaagggcaactcaaaagagaggtctacggagaaaagaaattcagggggactcccaaagacatgtcttgctcctttggaatatgcatactattgtctgtggactaaatgaggaggtcatttaggtggggatcaagattcaaaaccacagaatctttagaggtgaagagggcttagagttcaccctaaccggacacttagaagaacatgctgatgacgggtatgcagcctctgattaagcactttagcagaaactcactgctccctgagacagcccatttcacatttagactcttgtaatttttagaaacttctattgtatgcgttgaaatccatcaccctgcatttacattcattctgttcatttcagcacacattaatttggccacctactacccagaggcattgtgcttgtcacagcagaggggtcaaacatgagaaaaacatgttccagccttcaaggaacttccagtccatggagaacataattacccatacaccagattggatgtaataagtgatgcagatgtatcaagaaagcacagggcagggagagattagtgttagcttgggaaaggtttcatggagaagaccgctgtcaagctgggccttccgacagcattcctctgggaaggagggcattccaggttataagtccacccacaccctaactaggaatagcaaatagtcctatgttgcaagaaagtagaatcgtaacttgcctgccccctaccttgcacccctcatcctgcaggtcctgggctcctaaatgacactaaagtctacacagtggacctgggcagaacggtgaccatcaactgccctttcaagactgagaatgctcaaaagaggaagtccttgtacaagcagataggcctgtaccctgtgctggtcatcgactccagtggttatgtaaatcccaactatacaggaagaatacgccttgatattcagggtactggccagttactgttcagcgttgtcatcaaccaactcaggctcagcgatgctgggcagtatctctgccaggctggggatgattccaatagtaataagaagaatgctgacctccaagtgctaaagcccgagcccgagctggtttatgaagacctgaggggctcagtgaccttccactgtgccctgggccctgaggtggcaaacgtggccaaatttctgtgccgacagagcagtggggaaaactgtgacgtggtcgtcaacaccctggggaagagggccccagcctttgagggcaggatcctgctcaacccccaggacaaggatggctcattcagtgtggtgatcacaggcctgaggaaggaggatgcagggcgctacctgtgtggagcccattcggatggtcagctgcaggaaggctcgcctatccaggcctggcaactcttcgtcaatgagggtaagaccctagagagggagggggagtaggtggggcagtctcgcaggtgagagccaagctcagctccctctgagtgtattcatcaatagtcatcaatcagccaacagcatccactcaatgaccagccccgaactggaggctgcgtgggctgctgcacaggacagcaagaaaaagcaacctctgcctgatggcagctcctaattactcttctgttatcaaagtcattttgatggctgtccctgcttaacaagcaagaggtgagtaaagctcttgattgaggcaggacttatagactgtgtttcagggctgtggcaggctctgcaggggtcctctgtcccctcccctggcccctgaacaagatgggtgcctcatccctcacattcagatggaaaaaggattggcttatcttggtctcaatgcgttcccaggagtgccccagcctctaaatgtttcactgtcacatttcgtagggttatttgtgaatttcagcaccatctggcccactcagccctactccagtgagccatcagcatggtgaaagaattaaatcccagctccttctcatcccagagcaccctgcatagagttgccctcgtgagaagcagcaaaccagtacttgcagttccaagtatctgtgcttgtgactttttttttttaaaggggcttatattctctgcatgccatgtccacatccagctctgggttttcaccagaatcccctgcatctttggtcacctgcttctctctggatctcagctttagctgcctggagaatggctatcgtctttgagatgccccttggggccccaacaattaagctcacctttgctacatactttatagtttacatcataccatcctaaatatattttcttgatttgggcataatccattgggccacttttgtggaatacacttgttagtgtactaaatagacaaaaacctacacagagggagactttgtaagaagccaaagaagagctgatatcctctccttcaactccttccattctctgctcagaataagatgggggaaaagaacaacatgtgcaggctgatggggagactccaagcccttggagtctggccctgatggctccagctgcaggctctgtgacattaggaaagctccttttcattttctgaagagggtaaggtgatgcgtgtaaacttcactccccatcctggctgagaccccgggaagaaggcttctcaggccacgcaaggctcttcctgcgtggccatcctcccatcccatctctgtctgtgcttccagagtccacgattccccgcagccccactgtggtgaagggggtggcaggaggctctgtggccgtgctctgcccctacaaccgtaaggaaagcaaaagcatcaagtactggtgtctctgggaaggggcccagaatggccgctgccccctgctggtggacagcgaggggtgggttaaggcccagtacgagggccgcctctccctgctggaggagccaggcaacggcaccttcactgtcatcctcaaccagctcaccagccgggacgccggcttctactggtgtctgaccaacggcgatactctctggaggaccaccgtggagatcaagattatcgaaggtaggagttgacagggagggagaaagctctaaaacctctccagccagcagcagcatccccaaccactcttcctcctttttcacccgcctccaccctgatgggccagacctcaggagggagcccacctatccagaggtcacattttcatgcctataacacgcaccttacactctgaattaccatacatggtacctcctactaccaagaacatgggcttctttcgcagtgtgcaggcatcagctgaagtcaaggattgcagatacctctttgtattgagtctagaagagaaggaagagtgaggaaagcaaactgaagtccatgtgtgaagatctatggtctatggtagactctggattgatcatggtgctcatcaataataattattacctaggcacacaattacatttcttctgtagtcagaataacatacttatttctaatgctatccaaagaggatatgtagactgaacatggtggtgcatgcctgtaatctcagcaccttgggaggccaagacaggaagattgcttgagcccaggagatggaggctgcagtgagctatgatcgcaccactaccctccagcctgggtgacagagagagaccttgtctcaaaaacaaaaacaaaaatatatatatatatgtatatgacatgtggacaaagattcccaccagagtcacttccctgcagcatctccaagtaccaacttctgtgtttatttctacctccctccctcctccaggagaaccaaacctcaaggtaccagggaatgtcacggctgtgctgggagagactctcaaggtcccctgtcactttccatgcaaattctcctcgtacgagaaatactggtgcaagtggaataacacgggctgccaggccctgcccagccaagacgaaggccccagcaaggccttcgtgaactgtgacgagaacagccggcttgtctccctgaccctgaacctggtgaccagggctgatgagggctggtactggtgtggagtgaagcagggccacttctatggagagactgcagccgtctatgtggcagttgaagagaggaaggcagcgggtgagtctccaaggacagggcctgcacccctcagacccagaggcaggacttcctgaaggcccctgcctgagagcttctcaatcagtgctggcccctatgtttggctgtaagaggctgaaagtggagagtgggaagggaggggacatttaggtcctatatagcctcgttgagcccttcaaaagggacatctcaaataaacataccaactaagtaaaaatagtgggtttgctatttaacctcggcattaagacaactcccagctgaatgtggtggctcacacctgtaatcccagcactttgggaggccgaggtaggcagatcacttgaggccaggagttcaacaccagcctggctgacatggagaaaactcgtctctactaaaaatacaaaaattagctgggcatggtggtgtaatcccagctatttgggtggctgaggcatgagaattgcttgaacccaagaggcaggggttgcagtgaactgagatcgtgccaccacactctagcctaggcaacagagctagattccatttcaaaaaaaaaaaaaagacaagtcccatagttgccacttcaacccagattgaagtctcttctatatctggaaatattcttctctgtatagaagaataatatgcatacatcactgtcatatgcaatatgttcatcccccttccccctgccaaagctcgccctcgaaagagggccagataccttcatttacaaggtctgatcaggaaaattaggaaacatctagtaaatttgcatttcaagtccccttttaaaatttcacatgaaatgttttagccctaataagggtatttgtagtccctcaagaaatcctattgggtctggaccctgcggatgggactcactgaggggcccatcgccaggctacctccagggggcagcactatcatacccagctgggcagtcaggaagcctggggcagcgtctcagagccttgaaaatctcccgggcataagtgatgggtcagcctttatgcacagctggtctatgacacgaagccttgaaggtccccactatacttttggtagtaatggggcagagatcatctgtgacagctgaagaaggccatcacagctgtttctaatgtcatcctgggtcctaccccaacagccttgagatcgaaccctgaccctgtgattcctcatgaagtctcccccagactccttcacctcgaggagtaagagcatagagaaaaatcacaacccaggcccactcttccctgctgcagggtcccgcgatgtcagcctagcgaaggcagacgctgctcctgatgagaaggtgctagactctggttttcgggagattgagaacaaagccattcaggatcccaggctttttgcagaggaaaaggcggtggcagatacaagagatcaagccgatgggagcagagcatctgtggattccggcaggtaaggaaggattcaaggctccccactcggagaacaccccagagccgagcacctgaggctgggccaccaggtccaaggaggaaagcccatctgtctcttgagcactggggcagcccttactacctctgcttatatgtgggagggtcctatggtaccctctgcccttctcccatggctggggaggtgtttacaattcagttcaatcttccaggcctaggatgcaacaaggcccagtgcgtgcctttgccagtctgggaaggcttcttagaagaacagagctagggagctgcatcagcagggtggggtggataaacctgggaggaaaaaggactaagccaaccttgccagcacatcgtcgggcccccagatctcccttccagggatgaactaacttaagccttcttccagctctgaggaacaaggtggaagctccagagcgctggtctccaccctggtgcccctgggcctggtgctggcagtgggagccgtggctgtgggggtggccagagcccggcacaggaagaacgtcggtgagtccctgggatactccctgcctcccacctccaacccgagccctcagtcctgaatcatccacccatagaggaagctgctgtgtctcttctttttcatgagctaaaacaaaggatcccgagaaagcaggatggggaaagataaacccacacatactcgaaactgaaattcagagctgctgtccaaatactaacactggaaaatcatctccaattacccaggatctaggttcagagacagggctgccaggaagaggagattgggtttcaggagaccctgggcttggactaattggataactaatgagctgtgtgacattgagccatccttatgccatgcctcagtttcctcatggctcaagtcaaggatgataatcaggacctcacggggctgatgtgaggaccaaaggagatgctgtgcattgaaaggtcccagagtgacaaagatcagggattaccaagtcctgattacccaggaaaagggactggggaggagactcggatcatttccatccccctgggtcatagtcagagctgcaccacctcagctgtcctgcagggctacagtggatccgcccagagagaagcagcccagcctggccttctaggtcccagcccctgtccttacaccaactcctcttcctcccggacagaccgagtttcaatcagaagctacaggacagacattagcatgtcagacttcgagaactccagggaatttggagccaatgacaacatgggagcctcttcgatcactcaggagacatccctcggaggaaaagaaggtatgaccctcactcaagggaatgctcagcccctggggagagtaagaattggtctcacatctgggttgggaaaaggaggctagtaagggctaacctaccctctttcttcacacagagtttgttgccaccactgagagcaccacagagaccaaagaacccaagaaggcaaaaagggtgaggaggaagaaggaagccccactacatgacaaagaaatgcagcatgaggggatgcagttagacttcagaaagaactacctcaacatgggggccgatcccagaatagggaggatgatataaatagtcctcaggagtcctcaggactttttgaggaagaactatatcttactggttgtgggatgctgatgtggataaggcccaggaaggaggtgagctatatgattaggctgtaaaactgcaggagagaggcaggccaggagatgaggaaagcaggtgcataaaagatgggaagctacaatgccaaatgctggtgattaaatggatgctcttcctgggttgggggacccaaggacctcaggccacacatcctcccttgagggtttgctcaggaccagctttttgcctgggcctaggagacatttgcttgcggtgggcagtttgaggctagaagcccctgctcacttctcttgaagccccaccagaggcaactcctgccttgggtgccatataccatcccctcaatctgccctaggactcaggggaccaagaaaaataacatctcatgcctttaatcccgaggtgagagtttttgttgttgttgttgttgtttttatcatatctactttttcttgaaacatctctggcatttagcaaagttagaacgagttattcctgggacagccttcccctttaactttgtggtgccaaaaagctacctgtctgggctggtggagaaagaaaaacatacaccaccgtggttgaccccagcctaggccaccttgcccgtggactgtgtgggcagcttccggggacaggcccgggcaacagaggcggttccactccgtgtgtcagaaggaggtagtgagacagaagaagatatttttagaggctgcaactttccatttctcaaaatgcgtccttcttggtgagcatgggggctgggatgagaacagtgggccccaaaggcttgtgttgcttggaccaagatcacgaattcaggacattaagcacctcccctcccctgactccacccactgagccagtgcccccaacactgatgcctctcctcttgccccttagtcatccaaggaggaagccgagatggcctacaaagacttcctgctccagtccagcaccgtggccgccgaggcccaggacggcccccaggaagcctagacggtgtcgccgcctgctccctgcacccatgacaatcaccttcagaatcatgtcgatcctggggccctcagctcctggggaccccactccctgctctaacacctgcctaggtttttcctactgtcctcagaggcgtgctggtcccctcctcagtgacatcaaagcctggcctaattgttcctattggggatgagggtggcatgaggaggtcccacttgcaacttctttctgttgagagaacctcaggtacggagaagaatagaggtcctcatgggtcccttgaaggaagagggaccagggtgggagagctgattgcagaaaggagagacgtgcagcgcccctctgcacccttatcatgggatgtcaacagaatttttccctccactccatccctccctcccgtccttcccctcttcttctttccttccatcaaaagatgtatttgaattcatactagaattcaggtgctttgctagatgctgtgacaggtatgccaccaacactgctcacagcctttctgaggacaccagtgaaagaagccacagctcttcttggcgtatttatactcactgagtcttaacttttcaccaggggtgctcacctctgcccctattgggagaggtcataaaatgtctcgagtcctaaggccttaggggtcatgtatgatgagcatacacacaggtaattataaacccacattcttaccatttcacacataagaaaattgaggtttggaagagtgaagcgtttttctttttcttttttttttttgagacggagtctctcactgtcgcccaggctggagtgcagtggcgcaatctcggctcactgcaacctccgcctcccaggttgacaccattctcctgcctcaccctcccaagtagctgggactacaggcgcctgccagcacgcctggctaattttttgtatttttagtagagacagggtttcaccgtgttagccaggatggtctcgatctcctgacctcgtgatccgcctgcctctgcctcccaaagtgctgggattacaggcgtgagccaccgcgtccggcctctttttttcttttcttttttttgagacaaagtctcactgtgtcacccagactggaatgcagtgacacaatctcggctcactgaaacctctgccttccaggttcaagctattctcatgcctcagcctctcaagtagctgggactacagatgtgggccaccatgtctggctaattttttttttttttttttttttttgtagagacagggtttcgccatgttgacgagactggtctcgaactcctggcctcaagtgatctgccgcctcagcttctcaaagtactgggattatataggcatgagccactgagcctggccctgaagcgtttttctcaaaggccctcagtgagataaattagatttggcatctcctgtcctgggccagggatctctctacaagagcccctgcccctctgttggaggcacagttttagaataaggaggaggagggagaagagaaaatgtaaaggagggagatctttcccaggccgcaccatttctgtcactcacatggacccaagataaaagaatggccaaaccctcacaacccctgatgtttgaagagttccaagttgaagggaaacaaagaagtgtttgatggtgccagagaggggctgctctccagaaagctaaaatttaatttcttttttcctctgagttctgtacttcaaccagcctacaagctggcacttgctaacaaatcagaaatatgacaattaatgattaaagactgtgattgcc

SEQ ID NO: 118 - DNA, 61635 bp, Homo sapiens; identical to SEQ ID NO: 105

SEQ ID NO: 119 - DNA, 21199 bp, Homo sapiens
gtaagctccaggaaggatcccgcgggggacctgacagctcacggtcctggccgacaaccgccctgggagcggaatggatggagcccgcagtcgtcccggcgcactgggcaagctctgctcccactgtggcaggccagatctccattagcaaccagagcagctctcaccaacgcctcactgtcattctgatgcatgtataagttaaacattggagaaactggtgccttaggagaaaggctagaatgtaaagacaagtccattaggatcccgcctgagctttttcaacccctagagtttaattaaaataatggagttgttcttgcacaccttgtaccaggacccactttagattatttccaaggctctgaagcaattgtctagacacctgaccctattaccgttaaagattggcttgagtgaaacactttggctttcgacttgtaaatgcactgaatgtatttaagcactagaaaaacttgtattaataattttgagttggtctggtgagttactccgaccttctccctgtaacctgttgcagaaataaactccgttctttcccagtctgtctgcatctcgttactgaacggcgagaacaagcagtcggacccgggtgggtcggggaacacaacctcacccgcagccgaaacccctcacccgcatcccttcccggcccgtgaggcgtccgcaggcggcggcgctcgggacacggcgttcgcggtgctcgcctccgctgcccgaggggaaaagggcaggagaaatctgaggagtccttgggccaggagccaaagcccctcaagtgcccgggcgcgaaccccaggcgccgagctctcacgtctgtctccgccagtacgctagagccggggtagtgggccagcactcaccggcccagccaatccaggacccgctctgcactgccccacccgccgcgcacacgcacgcgtccttttgcggccgctggcctctgattggctgggacggctgtgggtggggagaagccgggaggactgggtgcgcctgcagggatcggaagccggttggggtgtgagaggttttctcgctctaggtaagcgaaacaagccgggggactgcgagccagggactcgggccgcggggcgggaagaagtggggcagcgcttggccaggccgaaaggactttgggggtgggggctgggagtccgtgtctcgaatgagggaggagaggtggagttgccggggctcaggcccggcctcgagcatgggcggatgagaggagtcgggagccgaggcctagggtccttcgggtgaggggagacggagccagcgaggagatggagcagaagcttgtggagtgagttgccgagcggggaagactcgctgatggggtggtaatgagagacgggggccaggagggtgttgactgggcccgacggcggggagcgaggagcgggagcttccccggagcttggaacattctgaagagcgggctaagcggcaggcgaggcgggataggagagcgagcgctccggtcacggagtcacgacaaggtcacaggaagagaggcggcgaggaaggtcgggaggttgaggggagggcgtactagcagaggaccttccagtcctggtcttgcttttctccccgacctggtgtttcctccaccctgggaaagtgataaggcctagggtcctgtgtagtgcttctgtgaccgaattaaatttttctcctgccgagtcggcgggttagagattacaaagcacagcgtaagggcagaattaggagcagccgacatgatgcagcagtgatattcgcctttgtcttaaattcccggagtgggaagcagctatttccctcttcggagtaatccccacgacagggatccctgcttccggaagtacaaaggcactttggagtaagacaggtttggatggaaagttctaacaggttgaagcggtgacaacctggtcatgaagctccagcatgacacacatatttggagtcctgtatactaggagttctctttgtgcaccagagtcacttgaaggggcttcttaaagattccttgagctctgccccagaccacctgaatccggatctccatgctggggccttggcagccattttaaacaagctgatgggcgactgatgcaaaatcagtttgaagccagcgttgctttagatagtaattcccgtgacaaaatgactgtgaagaaagatccttcattcaacctgttacgtctcctgatgctggacggctcatcttcccttaatgcctctttaggttccctgtggaaaggtcttcagtcgtgtcttactaagcgtacagaattaatttgtgctctccaaactgactttaaatatctggttactggtgccttttttagcgtctattcaactttctgacagaaatctgggacaactactgtgggtggatgagaaaacgataatgaaggaaagtctggcagtggtgtagtgaaaaaagtcttttcaaatcacaattgaaattgttagatgagttaagtcactgaagaagattccgtttaccttaggcatgatttttttatatatatcattcaaagagaacaacgtgggcttctgttgagtaatggattcttaaattttctaatcagaattcttatctgccaatttaatctaatttacatcagcagcgtaagattgatgctttggcaatatatcgtcaatcaaaagaacccaggactctctatcagaagagctggattctaatcctaccccaccagacatgtattccttgtactgagcaattcgtataaccctctcacaaccctttccccacctgtaaaataaggctattggcttggattattcatctgatttgttactctcaaattatatgattagaacttattgttcctgatacttaaccagttttcaattcaggtggctataaaccatgaatactttggaaacttctacgtggtaattagacagttatcaaaattttgtattcagagagtattttagatatgtactatatgggaattataatattttgactacagaataacaaataactgatatgtgttggatttttaaatattaatccttactaattttattctgaaatgtacacataaggtattctggaatcacagacagattatcatctgtcgtttcaagcaaataatgaccattttgttccccacaccctgatgcttaccgcaggggctactttctgaaacccaggtcaaatgccctatccatacaagcttcagagtctgtatcatagatgaagaacggagaaataggttttcttctgttcttgatttatatacaggaaagagacaactaaccccctccctcctgaaaggagaaaaaaaaaaaaaccttttgctccattgacctgttggagaattagagtcagccagatgtgagataattataagaaaaactaccaactttcttgctatttttaaaaaacgatttatgtcctgtttttgtttgtttgttgggtccctcagcaagggtcttgcctgttgccccggctggagtgcagtggctggatcatggctcaccgcaacctccactttccaggctcaagcagccctcctgcctcagcctcctgaggagctgggactacaggtgtgcaccaccatgcccggctaccaactttcttgcttttaaagacaattcccaaatgattttttagtttagaaatgattcaggcaaaaaaggggaaaacatgcttttatatctgcagaagtttttagtttttaaaagtggattatggtatataatagttttgtcccctgtgttgcaaggaactaagacctcaggttatttctcttttcataggtacaatataagaaacataaaagaaataagcacttaggtacatacagttaggcatttttcttactgattaaactctacaaatctgtatgattgttatttttttgtactcaatattactgaataacctaagaatgctttcagttgttgagaaatgtaacttttaaatgtattcaagaaacatttgtagtgtacatattatatatagggtattgcaccaggcagtggagttggatacaagcagagcaggtattggtccctgacttgaaggattctagcaaaagaaacagacaaactggtgcttataagggttataaggaaagtacaaggtcctatgggactgcataaccaaagcacttacgaacttaaagagacaaaaatttctgagaggaggtcaattaagatgtgaacctgagtccagtatggtggcacccagtggcagtgtgaactgtgaggagttcgccgagttccaggaattactcaaggtgatgtggacagttgatacagactagtacattaattaaacactacagttccaacagcttcctttgcagggaagattgatgccagccaaacctgtaaacaactttgagtctttgatggcagctcatgccagtagggacagagtcataaaaaactatatagcccagacctcagcagtagtaaaaaacctctgagaagagagagaaaagaatttggacgatttaatattgttaaagcaactcagaacagagcaggcaaagttgaaatggatgtagtcagaatgataaatgacaggagctggaaggagtttaatgaatgctgccgaattcacttcaaacctccaaataaacagaataaacggagatactttttttttttttaaaggaccgggtcatctcataagagctaagcatgacaaatgtcaacagggcgggcttcctaggatgatttctgagccagtagtccaagaccttttgttgatttcagccccacttaggcaagacctcaaatataaataattctgataattatggagaaatcaactgctattttatactgattctgttaaaaaaaaagttttgtaactattaaaataatgttctgactcagtgtaaaaaaagaaaaaccaaacctgaaaaaaaaaatgggaggagttagctaggaaagagtatctgaaggggatggaaagggagggaaactctcacaagtagaggaatcagcttgtgcaaaggcttagaggtatagagagcatcttaaaaatatttaatgtggtcagaatgtggggttgggaagggaaatgaaaggatttgtgataaacttcccctttgagaaggtcatgttttttttttctttttctttttctttttcttttattttttaaaatttgagacagagtctctctgtggcccaggctggagtgcagttgcacaatttcagcgcactgcaacctctgcctcccgggttcaagcgatcctcctgcctcagcttcccaagtagctgggatttcaggcatgcacaccactatgcccagctaatttttgtatttttagtagagatgggggtttcaccatgttgaccaggctggtttcgaactcctgacctcaagtgattgcccaccttggtgccccaaagtgctgggattacaggcatgagccaccgcacctgcccgagaagttcatgattagatatgaaggcaactagtaaacatactggcctaaaataaatacagtgtttaatctctctatccagtccatttatgcagtttcttcaaagccagtctcaagtgtttctctgtgaaacgtgccaaacctcctttagctaaaatacatcactctctctaaattcagaccttgtctgtgttaggcttttgacaactaattacactgtgattgaaaccaccattgcaaaattataactgagacagtgaaagagatctgacctagccaaaaaaagatggagccaggcatgatggttcacgtctataatcctagcactttgggaggctgaggcgggcaaatcacttggggccaggagtttgagaccaggctggccaacatggcaaaaccccatctatactaaaaatacaaaaaaaaaaaaccaggcatggtggtgcacacctgttatcccagctgttaggctaaggcacaaatcactcaaacctcggaggcagaggttgcggtgagcaaagatcgagatcgtgctccagcctgcgtggcaactagaccctgtctcataaaacaaaaatagaaaaataaagcaaagatggtaacagccctttcctaaaacaaacccccttcttgcctggggactagactgcctttgtaggtttaatgaattagccacagattagaaattatggtttaggagtcgtgcagctggaagttataagattcttttttttttttttttttttttaatttatttttttattgataattcttgggtgtttctcacagagggggatttggcagggtcatgggacaatagtggagggaaggtcagcagataaacaagtgaacaaaggtctctggttttcctaggcagaggaccctgcggccttccgcagtgtttgtgtccctgattacttgagattagggattggtgatgactcttaacgagcatgctgccttcaagcatctgtttaacaaagcacatcttgcaccgcccttaatccatttaaccctgagtggacacagcacatgtttcagagagcacagggttgggggtaaggtcacagatcaacaggatcccaaggcagaggaatttttcttagtgcagaacaaaatgaaaagtctcccatgtctacttctttctacacagacacggcaaccatccgatttctcaatcttttccccacctttcccgcctttctattccacaaagccgccattgtcatcctggcccgttctcaatgagctgttgggcacacctcccagacggggtggtggccgggcagaggggctcctcacttcccagtaggggcggccgggcagaggcgcccctcacctcccgggcggggcggctggccgggcggggggctgaccccccccacctccctcccggacggggcggctggccggtcggggggctgaccccccacctccctcccggacggggcggctggccagccagaggggctcctcacttcccagtaggggcggccgggcagaggcgcccctcacctcccagacggggcggctggccgggcaggggggctgaccccccccacctccctcccggacggggcggctggccgggcggggggctgacccccccacctccctcgcggacggggcggctggccgggcagaggggctcctcacttcccagtaggggtggccgggcagaggcgcccctcacctcccggacggggcggctggccgggcaggggagctgaccccccccacctccctcccggacggggcggctggccgggcggggggccgacacccccacctccctcccggacggggcggctggccgggcggggggccgacccccccacctccctcccggacggggcggctggccgggcagaggggctcctcacttcccagtaggggcggccgggcagaggcgcccctcacctcccagacggggcggctggccgggcggagggctgacccccccacctccctcccggacggggcggctggccgggcagaggggctcctcacttcccagtaggggcggccgggcagaggcgcccctcacctcccggaccgggcggctggccgggcggggggctgacccccccacctccctcccggatggcacggctggccgggcggggggctgaccccccacctccctcccggatggggcggctggccgggcggggggctgaccccccctcacctccctcccggacggggtggctgccgggcggagatgctcctcacttcccagatggggtggctgctgggcggagaggctcctcacttctcagacggggcagctgccgggcggaggggctcctcacttctcagacggggtggttgccaggcagagggtctcctcacttctcagacggggcggccgggcagagacgctcctcacctcccagacggggtctcggccgggcagaggcgctcctcacatcccagatggggcggtggggcagaggcgctccccacatctcagacgatgggcggccgggcagagacgctcctcacttcctagatgtgatggcggctgggaagaggcgctcctcacttcctagatgggatggcggccgggcggagacgctcctcacttcccagactgggcggccgggcagaggggctcctcacatcccagacgatgggcggccaggcagagacactcctcacttcccagacggggtggcggccgggcagaggctgcaatctcggcactttgggaggccaaggcaggcggctgggaggtggaggttgtagtgagccgagatcacgccactgcactccagcctgggcaccactgagcactgagtgaacgagactccgtctgcaatcccggcacctcgggaggccgaggttggcggatcactcgcggttaggggctggagaccggcccggccaacacagcgaaaccccgtctccaccaaaaccagtcaggcgtggcggcgcgtgcctgcaatcgcaggcactcggcaggctgaggcaggagaatcaggcagggaggttgcagtgagccgagatggcagcagtacagtccagcttcggctccgcatgagagggagaccgtggggagagggagacggagacggagacggagacggagacggagaaggagggagagggagagggagacggagagggagacggagagggagagggagagggagagggacggaagttataagattctaaccctccctaaaatgctcctaagatcagtgcttgagatattttgcagaccctgcacttgatagaccaactggcaccacccagatcaataaactggctcgtctgatcttatgtcccctacctaggaactgactcagcacaagaggacagcttcaacttcccatttcatctccaacccaaccaatcagcactctgttctctggccttcccccacccaccaaattatccttaaaaactgatccctgaatgctccaagagactgatttgactaataataaaaatcctggtctcccacacagctggctttgggtgaattgctctttctctattgcaattcccctgtcttggtaaatcagctctgtctagccagcgggcaaggtgaacctgtttggcggttacatgatttctcttttttttttaaaaaaaaaaacaacaactaatttttgaacgattaattactttagtgtttatattgtattattcagatatatagtgagtatcttgaaccttgagcttattgaaccttatatataataaagctcattacttaggagtttattcagttaagaagtaatggagtacaaaaagaaggtttaagtccaatctaaattttcttttatttagctaagattttcttctatgtcagatgacagttgagtcttctcaatgaaggtgaggcttatagggatgaattcactttctaaactaagcacaccaccccctccggagttgcatttttgttgaggaccttaactgccactgactccccttgagtagcaaggtgttgaatgagaggtacttttatcaaagggagcataatgcacatgaaaaacccagaagtgaaagtaagattttatatgggtgttaggatgggcatagacttttaagtttattgtaattgacactaattagagacttgtatgcttacactatgcttcaggcccttattttatctgtgagtaaagtttattgcaattcaaaatagttcagtgaagaaagtatactttgttattgtggctaaaatgaaatagcatttgttaatgcctcattgtgataaaagggctattcacggagatgactgaaaaggaggaaaggagcctttgatccctgtgataatgaaaatgaatcctttttttttttttcctatccccttactcatacactatcaggctagatcttgcctttgggataccatttaaaggaattataaaaagagggtagagttttaaaaggaagcctaggggatataaggtatgtaaatgaaggcagatctgaagcttagaagatattaagaagaccctgagggtaattcagttttgtgctgcagtgatgttaaaaggtgctaatcatagggccaggtgtggtagctcatgcctgtaatcccaacactgggaggcaggtggatcacctgaggtcaggagttcgagaccagcctggtcaagatggtgaaaccccatctctactaaaaatacaaaaaaaattagccaggcatggtggcaggcacttctaatcccaggtatttgggaggctgaggcaggagaatcacttgaacctgggaggcagaggttgcagtgaaccaagactacgccattgcactccagcctgggcaacaagaacgaaactccatctcaaaaaaaaaaaaaaaagctaatcataagctggcacagtggctcacacctgtaatcccagcagtttgggaggctgaggtgggtggatcacgtgaggtcaggagtgaaaccctgtctctactaaagaatacaaaaaaattaggcacggtggtgtgtgccaaatggaggttgcagtgagccgagatcgtgccactgcactccaccctgggcaacagagcaagactcagtctcaaaaaagaaaaaaaactaatcataggtcattaaaaaaatctaaaaggctatgaaggagacatttctaccaatatttaaaataaaagctttgttcttaaaatgagtaaataatgagctaggtagaaactttggctattcagaataatcttttccccagaggcaaccaccatggataacagattactgtaatagactggaaactaatctgaagtgaaaattgaagcaaggaagcacattggaataaataaatcagcagttgaaagcaataaagactgcatttaactacaccgaaaagtgctaagtaggatttccaacatgatattgaaggttcaataggagttgtcagtttggtttgagtaacttaaaattgtcaagttaaatagttgattaaggatgaagatagccagaaaattagtagctactattttaattgataaaagtaacatcaatttaaaatttttcactatttttaattaacatggtgctaaaaatgaatgggttgtacaggggaaacggcaaaataatagggggaataagtgtatacaactctcccttgagagtgactgtacattaaaaatacagttaatttctaaaaatattttttaactttaggattatggataacatatactaagattctcatggaagttaggaatattttaaatacatccagatatttaataatgttcagatgcttttaattacagaacctcatagaaattctttctcagggagattcttcaagcaatcactatgtcaacagacacaggtgtttcccttccttcatatgaggaagatcagggatcaaaactcattcgaaaagctaaagaggcaccattcgtacccgttggtaagtttgactgacattttagtagtcttgaatatggtagagccgtgataatttgttcatttagcaatatcctgaaagaatgtattttccatttttttcttatgttgaaatatgctgagattggcatgatataaatctcatcataaagattcttctgtatgtattcagactttttttttctttttggagacagggtctctttcacctagactgaagtgcagtggcttgatcatagctcactgcccccatccctcgacctctcaggttcttgatcctcccacctcagcctcctaagtagctgggaccacaggtgtgcaccaccacgcccagcgaatttttgtagttttgtatagacacggggttttgcgatactgcctaggctagtcttgaactcctgggctcaagcaatccgcctgccctcagcctagtgctaggattataggcgtgagctgccactccagctgagacttcttattttattgagtcttatttcagtgcataatgttgtattgggggaccccaagaccatcctcaggttagatgattgggccaagactcataagactcaaaaatgcttgttacagtcatagtttattacagcaatgggatataggttaaagtcaacaaagacatatagaatgaagtgtaggataaaccagacacaaaattctaggtgtccccttcccagggagtcccacagggggagagggggtgcatttaattcttcagtactgatgtgatatgtggcaatacatgctaagtcttgccatctagggaagcccaccaagccttggtaaccaggttttattgaggtgtcagctgtgactgaaattagctattcagtctcctatcccccagaggtcggactcgcaggcatattaaaattcatttaatatgcagttaaaacagatgaaaggtgaaatttatagtatataaattaatcttaagaaaaagtttaaaaatttttaatcttacagagaattttaaaattacctttaatgccaccatttagatataactgttgttaccattttgatgtacatatttctccagttgttttttctttttttatcttcacaaattcaggatcatactaagatgcatatatgtattataatttttatctcatgtttttaactatgttattcgaaactcgacttttttttttttttccgagaaggagtttcactcttgttgcccaggctggagtgcagtggcgcgatatcggctcactgcaacctccacctcttgggttcaagcgattcttctgcctcagcctcctgagtagctagaattataggtgcccgccgccacgccagctaatttctttgtatttttagtagagatgggggtttcatcatgttggccaggctggtctcgaactcctgatctcaggtgatccacctgcctcggcctcccaaagtgctgggattacaggtgtgagccaccgtgcctggcctaaaactctactttttttttttttgaaacggagtcttgctctgtcgcccaggctggagtgcagtggcaggatcttggctcactgcaagctccgcctcccgagttcacgccattctcctgcctcagcctcccgagtagctgggactacaggtgctcgccaccacgcctggctaattttttctatcttttagtagagacagggtttcaccgtgttagccaggatgatctcgatctcctgatcttgtgatccgcccgcctcggcctcccaaagtgctggaattataggcgtgagccaccgcgcccggccaaaactccacttttaagaatgacttaatttatatgatataaattactgttgtatataacattattataatcctcttggtagaaatttatgtgatttctaatttttcattattaacaattaaactactgagcatccttttagatggctctccaagaagttaaaggactttgaagtctcttgaaggaatttttcttctgaccatataattaataagttagttgcaaaagtacataaaacagaaaggtaccatgtcctatgatcccgactctgaaagacaacagcagtctgcacagtctgtcagtgttttcttctctgtgtactaccataaactattatttataattatttttagatgaaatatttttctttagccttgttcattatctttttataacaatgcatataggaacatttatatttttaataattgaatcattaattttgtagatatacaatgttttgtaacagtgatctataaaattttttggttgtatattccctcagtaaaaaataatttgagcacgtacttcctgccagtgtgttgtgtgtttacctatttttaagtcatttatgacttttaagtcatttaagtcattatgaaatacgcagaaagacatttcaaaaggataagatacaaatataaaattttctgctctttaatgggttgtcatttatacatatcccttcttgggagtacataaaccctacattgatttaaccattgctgtattgacgacataggagttgttcccattatgttgattttacaaactgttggaagactgtgtgtgtaaaaattaaatatccttatatacttaattgtaccaaaacaatgatttacaccaataggctgtgatgggctggttttcccatactctcagtagcactagatattatcattctttgagcatcttttcatatgtattggtcattcaggcttctcttctgtgaattagcttttttgtttttgcttttgtttctgttttaactaggatgtctttttctaattaaattataattatgtattttaggtattaatgttttcttaatatgttgcaaggccttcatgatcctgggattacttaggttcctgtatttccttatgttgtgcatttatcattgagatactaatctatctggaatttatttgtaggtatgacatgaggcaaaatctaacttattttccgtatggatactttaattttctatcacagtgatttgggtatctgttttgcattctttttccacttatttgaaatgtgaactatgtcatatactaaacatatgagagatttgttactcaactactgtatgtattttgttgctttgatctgtctgccagaaacttagtggtatgtttagatacctcataagccagtacactttcactattctaccttcttaaaaagagcttgcctgtttactttgaaattagcttgttaattgcagctactcagcaggccaaggcaggagcgtcacttgagcccaggagttcagggctgtagtgtataatgatcatgcctgcgaatacccactgaactctagtctgggaaacataggaagacgccgtgtctgaaaaaaagagagaaaagaaaaagaaactggcttgcccagtccaaaacgggaaaaatgtctcatttttacatttggattacattgaatttataaatttggagagaatggaaattttagaatgtggtgcatctactgattttcattcaaaccttttgtgtccttaaatatgattttattgttttctctaggtctagaaatttaatttctctagatatgctttttaatgtattcatcaaagtaatcttttttcttattggttctagttgtttttctttctttctttcgagacggagtcttgctctgtcgctcaggctggagtgcagtggcacaatctcagcttactgcaacctccgcctcccgggttcaagcaattcttgtgcctcagcctcccgagtagctggtattacaggcgcctgccaccatacctggctaatttttgtagttttagtagagacagggttttgccatgttggccaggttggtctcgaattcctgacctcaaatgatccacctgcctcagcctcccaaagtactgggattacaggcgtgagccactgcacctggcctctagttgtgtttcatttgattctcttggatttcctatacacacagttagatgatctgcaaaccagtagagtttcttcctaattatgcgtatagttttttttatgtgatttaaaattgtttaggatatccaggcaacaacagcagtattcacatgtatccctgtcttattctgatctttaaagggaacttttttttcttatctctttttcgttttttaataaaaaataaggctgagcactttggctcattcctgtaatcccagtgctttgcggggctgaggcaggaggatcacttgagcctaggagttcaagacagcctgggcaacacagtgagaccctgtctctacaaaaaaaatttaaaaattagctgggcatggtgccacacgcctgtagtcccagctacttgggaggctgagatgggagtttgcttgagcctgggaggtcgaagctgtggtgaaccatgatcatgccactacagcctgggtgacagagcaagaccctgtctctaaataaataaataaatagataaaaattaaaaatggaatatttatagtgttttaacactaagtacaatttgtatttgcttttggtgtctgaactatattctaatttacttttactattcagatgttcacatagtttcatctttcgtgaatcttaagagatttttcgtttttttttttgttcttggatgttcttccagtgaattcttttttttaatttattttttattaaaattttttttttttgtagacacaggtctcactctgttgcccatgctggtctcaaacccttggcctcaagcaatcctcctacctcagcctcccaaagtgctaggattacagggatgagccactgctcctggccaagattttcttatgtaaaagcaatggttaattcccaaagtaggccaggcacagtggttcacacctataatcccagcacttttttgggaggctgaggcaggcagatcatgaggtcaggagttcgagaccagcctgaccaatgtggggaaaccccatctctactaaaaatacaaaaattagccgggtgtggttggcacattcctgtaatcccagctactcgggaagctggggcaggagaatcacttgaactcaggagtcggaggttgcagtgagcggagattgcaccactgcactccagcctgggtgacagaacaagactccgtctcaaaaaaaaaaaaaaaaaaaattcccaaagtaaaaacctaatgatcatggttgataatattattctaatacattttaaagttgataagctagtatttggtttaggaattttatatctatgtttataatttatattgctttgtaattctcttctcatggcttttttttttattttttagtttttggagacagtcccgctctgtcgcccaggctggagtgcagtggcaggatctcggctcactgcagcctctgcctcctgggttcaagtgattctcctacctcagcttcctgagtagctgggactactcccgccaccacaccaggctgatttttgtgtttttagtagagacggggtttcaccattttggccaggctagtctcgaactcctgttttcaagtgattcacctgcctcggcctcccaaagtgcttggattacaggtgtgagccactgcacccagcctcttatgttatcttaattttgttttggtatcagggatttgttttcttggaaaatatattggaaaaaaatgtattgctatgtttttaatgccctggaatactttaaataacatgaattgagaatgcccttataatttttattagaccttgttaatgaaactattggggtctttatcttttggggataaagcatggattgcccatttaattctttctatggttattggtatagaaaggttttctacaacttcttgaatcaaatttaggaatttgtattctcctcagaaatcattcatttcacctagattttcaaatttaattggcaaagagcaatcatctcttatttttaaaaatctctttatcacttgtgattatatccacttcctcattcctaatgtcgtatgtttattttctctttgatcagacttcctagaggttttacaattttatttgttctaagaaccagtactgtttttatttttcaaataatgtttgatagcttcctaatctctcagtttttactttaacctccaaatctagttattggtgctcagcttctcagtggttagaggtgggggtatgtgtgtggttgttttacgttttgattgctaagttttggccttatggtagtcatccaggaagaaggactttttggaagttggaattttctttgtggcctaataaatgattggttttgtcaaagcttcatagacattttaaagaatgtgggatctctgttttaaattaaaatattaaattttatttatttttaagaatttaagtaagtttatttaatggtgccgtgcaattctgtagctttagtttggggcttcttattctgttgttttctgaaagagacagattttcccattttgttgtcttctaatagagctaatcttgtgttcctaacaatttttgctccatttatttattttgctgctatattagattattttaaagttttatgactttaaaaatttatatatatatatatatatatatatatttttgagatggagtctcgctctgtcgcccaggctggagtgcagtggtgtgatctcggctcactgcaacctccgcctcccaggttcaagcattctcctgcctcagcctcccaagtagctgggattacaggcgcatgccaccatgcccggctaattttttgtatttttagtagagatgaccaggctgttggccaggctggtctcaaacccctgatctcaggtgatccacctgcctcaacctcccaaagtgctgggatgatgggtgtgagctactgctcccagccctaatttttttttcctccttatgatttggaagttctgcggctattcttacactgcttgctggtggttatctttacattgtcaaactaggatgtgtttttttcatctatttcctgtattaaaatgaatataaatttattccctaagacctttagcacacgttttgttgtgataatcatagcctaatttcagattcttaattttgctatattataccagtcattttcaaggaaccagtacagatttttctgtctttattgctcaccattatatcttaaccattatgtctttatttcttgaactgtccattttgactcactgtttttatttgactggatattttcctctaggtttttgtatcagtacctgggtggcagcttgggaaagacagccctcctgtagtcccagttattagggaggctgagcgaagaggatcacctgagcctgggagaacaaggctgcagtgagctatgattgtgcggctgcactccagcctgggcaacagagcaagaccccatctcttaaaaaataaaataataaatcttaaaaagaaaacatggaaggtcatgtcctgaatgcttttgccctcaaaatgaatgagagtttggctctgtatagaactctaggatcataatccttttaactgaaactaatattgctctattcttttcctttatttacttcttcccagtacaatatcccaaagtttgaaatattcaggcaatgtttctcagtggtagtagtgtgtaggattgtctctggtatattaactgattaccttgagggagggaaataggacagagaggaaatggaataaattcattctctaagtcaagacctttggcacactttcgttctgataatcataatctaggttcctgttaattccctagcagttttttaaaggagtttatctactggccccacaaacccatgtttttaaagataatcctgactttctggatctgttgttgtttgcttaaagatttttggttttgataggggaaaacatgaaaaactcaatttgtatgttagctaattaatgatctgataaagaatcctcataaaaataatagaatgtacattgactgatggtaaagtcatcttggtcccttctcatgcatctgacatacttgttactttgttttacaggaatagcgggttttgcagcaattgttgcatatggattatataaactgaagagcaggggaaatactaaaatgtccattcatctgatccacatgcgtgtggcagcccaaggctttgttgtaggagcaatgactgttggtaggttcctataggaaatttcaaattttcgtttctcattaaggtatttctttacaaacaaaataggtaaatatttttagctgaccttttagcagttggagaatatcacttatactcattttcatgtaaaaaatgaattaatgaagataattcaagtagtgacatagtttttctatgatatatcctactaagattttaaagaaaaaaaaaatcctgtcaatcactgagtttataatttcattgaagagcctagacatgtaattggggttgatagtaacatctgttatctgggagagacatacaattgctattttattgtgtttttaaaggagagattcttaaagtttaggtattacatgcttcttctattggctttataattcattgactttatctggtattatgtagcaagagtgattcctttcaaagttaccagataaatattgattgttctttcaaagaaatattgtaacatgtgaagtagccataccagccctttgctacttgggaaactactgtatgtaacaagagttttagagatttaagatgtttaagaaggcaagagtataagcttcctagggtcttattccccttgtaaatattccatgctagcagtggtgctactttcagctattttatgaactggtttttatttttgaatatttaagaaaatactgaaatgcttaactagcattctttttctttaggtatgggctattccatgtatcgggaattctgggcaaaacctaagccttagaagaagagatgctgtcttggtcttgttggaggagcttgctttagttagatgtcttattattaaagttacctattattgttggaaataaactaatttgtatgggtttagatggtaacatggcattttgaatattggcttcctttcttgcaggcttgatttgcttggtgaccgaattactagtgactagtttactaactaggtcattcaaggaagtcaagttaacttaaacatgtcacctaaatgcacttgatggtgttgaaatgtccaccttcttaaatttttaagatgaacttagttctaaagaagataacaggccaatcctgaaggtactccctgtttgctgcagaatgtcagatattttggatgttgcataagagtcctatttgccccagttaattcaacttttgtctgcctgttttgtggactggctggctctgttagaactctgtccaaaaagtgcatggaatataacttgtaaagcttcccacaattgacaatatatatgcatgtgtttaaaccaaatccagaaagcttaaacaatagagctgcataatagtatttattaaagaatcacaactgtaaacatgagaataatttaaggattctagtttagttttttgtaattgcaaattatatttttgctgctgatatattagaataatttttaaatgtcatcttgaaatagaaatatgtattttaagcactcacgcaaaggtaaatgaacacgttttaaatgtgtgtgttgctaattttttccataagaattgtaaacattgaactgaacaaattacctataatggatttggttaatgacttatgagcaagctggtttggccagacagtatacccaaacttttatataatatacagaaggctatcacacttgtgaaattctcttgtctaatctgaatttgcattccatggtgttaacatggtatatgtattgttattaaagtaagtgacccatg

SEQ ID NO: 120 - DNA, 1316 bp, Homo sapiens
tgcataaggctgaatggttaactgaaaaccgtaataaagaaccctctcgtgctggcccctgacttaaaccaagacaacaattaagagtggattctttgctttaggttcaagatgatgaacaaatggaacacgagaaggtgccactcaaacctgagtcaaggaacacagctaagtcctcgaggcaggccaagattcatacctgaagatttctccagaaataggacctcaaggcaaagccaaaggcatgagtggaaccatagagcccaaatgggtggttatggatgggtctttttaaaagattattaattatcatagtaaaattatacatgacataaattttatcattttaaccagagtacagtttcatggcattaagtatattgacagtgttgttttatcattaacaatgtcttcaggactttttcatcttcacaaactgaaacgctgtacctattcaacaataacaccccaatctcctcttcccccaccatccagttttttgtctccatgaatctgactcctcgaggaaactcacataagcggaattgtatttgtcctttttttttttttttttttttttgagatggaatcttgctctgttgcccaggctggagtgcagtgttgcaatctcagctaactgcatcctctgcctccctggttcaagtgattctcctgcctcagcctcccgagtagctgggactacaggtatgtgccaccacgcccagctaatttttgtattttttagtagagacagggtttcgccgtgttggccaggctggtctcgaactcctgacctcaagtgacccacctgccttggcctcccaaagtgctgggattacaggtgtgagccaccatgcctggcctgtatttgcctttttgtgactggcctatttcactcagcataatgtcttcaaagtccatccatgttgtagcaggtgtcagaatctccttcctgtttaaagtttgaatcaatccacgacgccctccacgtgttccactgcctcttctcttctcgcttgggaacgccggtctcacctcggcttgcaatggaccccaactgctcctgcgccgctggaggctcctacgcctgcgccggctcctgcaagtgcaaaaagtgcaaatgcacctcctgcaagaagagctgctgctcctgttgccccctgggctgtgccaagtgtgcccagggctgcatccgcaaaggggcttcggaaaagtgcagctgctgtgcctgatgtcgggactgccctgctctcggatgaaaacagaatgacacgtaaagtccgggatttttttttctacaaccccgacccatttgc

SEQ ID NO: 121 - DNA, 28668 bp, Homo sapiens
gaggaacggcaaaccaaaaagtccaccttgggtgtcatggtgatggaattggaggcggagaccagggagagcagcgggctaggatctctgagagtctccgcaacatggcggccctggaaccacctgaccggcaggaggcggagctccgccccagctcgctcggccccaccccgctcggccctgcccagcgcactcctagaccggggcgcaagggttgtgaggtgtttgagcgaagcgcctgcgcagggcagcggcgcgcggggcggaggctttataatcacttcgtcgttgccgctcggcttctatcgccgggagggcggttgaggcggtggtggcggcgtcggcggcggccgggcgctggctgaggggcgctgaggcgggagctgtggcggcgctgggcgcccctggctcctcggcctctgccggccatgggctccgagaaggactccgagtcgccgcgctccacatcgctacatgcggccgcacccgaccctaagtgccgcagcggcggccggcgccggcgcctcaccttgcacagcgtcttctctgcctcggcccgcggccgccgcgcccgggccaagccgcaggccgagccgccgcccccggctgcgcagccgccgcccgccccggcccctgccgcggcccagggcccgccgcccgaggcgctgcccgccgagccggccgccgaggccgaggcggaggccgcggcggcggcggcggagcctgggttcgacgatgaggaggcggcggagggcggtggcccgggcgcggaggaggtggagtgtccgctgtgcctggtgcggctgccgcctgagcgggccccgcgcctcctcagctgtccgcaccgctcgtgccgggactgcctccgccactacctgcgcctggagataagcgagagcagggtgcccatcagctgccccgagtgcagcgagcgactcaacccgcacgacatccgcttgctgctcgccgacccgccgcttatgcacaagtacgaggagttcatgctgcgccgctacctagcctcggaccccgactgccgctggtgcccggccccggactgcgggtgagcgcgggggcgtggcgcgggtggcggcgggctgcagccgaggggcgtggctgggggcagcagggaccccgcgtgggtgtcccaagcagggaaacccgcaaggcggcagcttcggcggggtggtaaccatcaggcaagcccagactagtggtgtgaacgcacccgacaccccgccccctgccccagggctcgaggtggctgctaagcattcggtgaggggaagggagctgtccaagttaggagacagggagaggcggtttttttgttgggggaatgccctctgtccggaggtgaggacagtatctttttttttttttctttttttttttggagacggagtctcgccctgccgcccaggctggagtgcaatggcgcgatctcggctcactgcaacctccgcctctcaggttcaagcgattctcctgcctcagcctcccgagtagctgggattacaggcgcccgccaccacacccggctaatttctttgtatttttagtagagatggggtttcaccatgttggctaggctggtctcgaactcctgacctcaggtgatcctcctgcctcggcctcccaaagtgctgggattacaggcgtgagccaccgctcccggccaaggtggggagtatctcttaatgagagtggggaggggatatttggccaaggagggaatgagaatattctgagggggcagcgcgtcggaggggtgtgtccacttggctagggacagacttagcattgcagaagaaggcgtgttctccctgacaaccaccgctgaaagttgggatggaggtgactggggaataggctctcgggtaccctgagcactatgtgttctgtgccacgctatcgggaggcactctgtcgttcttaccttgctgccttgggtagggtgaggggtagacagatatgttctttgtccagagtctcaatgggggcactgagaagaatgcccagaggttggtgtgataggagaaattgtgtttctgaacccctttgatcttgagttcttgatgacagtctttttaatgcaccatgtaggctgaattttaaagggcagtaaattaaaatatgcaatatctgcagagacataatacaccagattttgctatctgaagcattcagtggagaccttcctcgccctccccgcctttagaagtctaattgttactgtcagtatatcccatgaaggggttgcacgcaggaagaggggctcatttaagtagttgggagtcagacagccattacctgttctgtgaccttgggcagataattttattcttgtgtgtcatgttttggcgacaaaaagatgctggggagtccttgcagtgtgtaaacgtaatgctagtaaaaagttgtgtgatctttagcttcaaaggagttaaggacttttaattgtagcctatatatcaaggtggttttgaaatctccatgatgctgctggttgtctcctttcaaaaggagctgtcttagagtgtctaggagagtaagaagagttaacttctgtttttaattctgccaaacttgtttagaaatgggtgtgctatttaacctcactgagatggggtttctaaattactttgaagtgttgtggtcaaaggaatggtgtttatggtggctcactttcactttcagttaataagtatcaggaaggaccttttaggttcatggaactgtctatgtctagtgatcttactggccctctgaggttaatttatattaaagttttacagatactgttgatctgttttcttaaccaaacgaatattaagagaacacaggccaggctcggtggctcacgcctatagtcctagcattctgggagaccaaggtgggtggatcacctgaggtcgggagctcaagaccagcctggccaacatagtggtatcctgtctctgctaaaaatagaaaaattagccgggcatggtggtgcacacctgtagtcccagctacccaggaggctgaggcagaatcgcttgaacctgtgaggcagaggtgcagtgagccgagatcaggccactatactccagcctgggtgacagagcgagattctgtctcaagaaaaaaaaaaaacaaaacactgcatagttaattttggaatagtacattaactcctttctgagatgtttccttgagttctaagaaatgtggcagatcatctttctggaaaaggtccctgtttgtttttttatttttctaaagtcagtttctgtctttgctcacatcaataaaaatgcacagaaaataattttcaagcttggtgacaactctcaactatttggaagttattaaaaaattaggccatttcttattttagccaagtattatgttagtatcctccagattttatttttttaattagttagaagaatgataatcatatatatagttatatatataaacaatgtatttttttatatgtgtcatctacggacttaaggtggagtttggggaaagaagaaagctggcctctcaatacctgtgtgccaggtatatataatttaattcgatacaaccttgtgagataggtttaggtttgatatagttttataaatgaggaaactaaagtttaaggaaattgaatgacttgttcagggtcatataactagtaagtggtggaaccaggcttagaacaggggtcttaattccaaccaatgccaatattccttccattcagcccctgttttaaaaagcatttgcttgtcaacatagccgcattattgaggatgctgctgcttgggtgcatttcattaagtgtagcctgaggacaacatggagaaagccaaagatactagagtctagtttcctttctgattcctgttgttaacagcctcctacctacgttatttttcttatctgaaataggtctaattctttcctgacttgagaggtttaattaatgtttacacggtgttttgagatcttcagttgaaagtggttatagggagtaactttaaaattctgttagttgccaaatagatgcctgagttctcccttgggatgtgcctagtggctttgcatctctttttttttgagacagcgtctcgctctgtcacccaagctggagtgcagcagtggtgcaatcacggctcactgcagcctcaatctcctgggctcaggcgatcctcctgcctcagcatctcaagtagctgggaacacgggtgcatgccaccaagcccagctaattattattattaatattattattattatttgtagagatagggtctccctgtgttgcccaggctggtctcgaactcctgggctcaagctgttttcccgccttggcctcccaaagtgctgggattattgctgcctctttttaatgccaggaaaaaaaatagcttctgtgttcttactggatgtcatggttcccttgttttgttttgaacagtgttgttttgttttgttttagagacagagtctcactctgtgcccaggctggagtgcagtggcatgatcatggcttactacaaccttgaactccttgactaaagcagtactcccacctcagcctcctgagtaactgggattataggcacgaaccactgcacactgctcctttgttttatttttttaaacaaatcgttctattcttctggggctggtagaggtcattgataaacactagaagagaagtccaagtcccagttacctcctattcccatacctgaccatctttactgcccacagataaagttcttgccagccaaattgatcaggtctcccctctgccttgtttgtatgtgcatttggtagggtgaggggggcatgtgagcaatcttacaggttctgatcattagttttactataattactcataataacaagaacaccatacattcagagattcatgatttgtttacagaatatttgtaggatagagcaaagagttttggatttttcttctcttacactcaaatatggttttattttattcataaataagggaaccaatttcagtgggaaaacattcacattataatttttttttttttgagacggagtctcgctctgtcacccaggctggagtgcagtggcaccatctctgctcagtgcaagctctgcctgccgggttcacgccattctcctgcctcagcctcctgagtagctgggaccacaggcgcccaccaccacgcctggttaattttttttttttttttttttgtatttttagtagagacggggtttcaccgtgttagctaggatggtctcgatctcctgacctcgtgatctgcccacctcggcctcccaaagtgctgggattacaggcgtgagccactgtgcccggcctcacattattatttaatatactaagaacaatatggcctagtataatcttaaaacaagctgtcaaatgagataaaattagttcaaaatacaaataactgattttttatagttctttatagtcttcagactataatctcattcagacataatttcattttagtctcatccaggtggatattggcgtgcattttataaaggagaaaccagttcagagaagtttaaacatggggcctagtgtttcattgctaataattggtacaattgatcttttacgcttttgagtctctgcccaagtatgtcttttcagaaaccccgaagtcaggtaactgtaatgttttcctctcaagtatcctgttgctaatcttaaaaccctttcagaatctctaggagactgacgggtgagcaaagtaggcaacagaaaatttcctggtgtacaggggcagatcttctgtacagatgaataagaagggataaggctgtcttgacctaaattctttgtgcaggtccaccactccagcctttcattgctgcctctgtcctctgcagaatccttcctcccacctgatcccaggaaacagtatcagctattggccttcccagacaactagactggaccatcccataaacaggaagcttttttcatccctagcacatttatgagggaagatcaagcaagctctttgagcaagacaaatttcagtcagtgaaggaggatttttgctttctgaagcctccctgaacctcttctcttgatttggctccatacctcctgttccacaacttttccctgcattccccaactccacaccaccccctcctcttgtgcacgtacaccaacctccatcccaatacatctgtctcagatttgccaaagtacttgtactaaaggagaacatctgtatcactcccctgcctaagactattcattgactacctaacctataagatgagttcttattatgtctttgagaacttatttgatctacccttatcatttaagctcctttacagtttccaaccatcttttttttttttttagatggagtctcgctctgttgcccaggcaggctggagtgcagtggtgcaatctcggctcactgcaagctccacctcccgggttcatgctattctcctgcctcagcctcctgagtagctgggactacaggcacctgcaaccatgcctggctaattttttgtatttttagcagagacggggttttaccgtgttagccaggatggtctcgatctcctgacctcgtgatccacccatctcagcctcccaaagtgctgggattacaggcgtgagccaccacgcccggccatctccaaccatcttttgattttattttctatttttcactcacatcactatttcctaaggtatgttataggcattacttgaaagaaaaatgttttgtgaggaaataagcttggaaaatactgagttaaacaaaataaaacaagtttatgagtttcttaaatctttaaacatgctaatatgctaatatgtagtataaatcttcaatataatgtaatttccccaatttagatcaccaggaaacaggtttttgttttttctgtagcatctttaaggcttaactcaaactttccctaaactcctttaatagttaccatgctggcctgcctttggttagtgtccttatttaaccataaaccttatgctctgaatagattgagagctcatgtctctagactaggatatctatattccaaccatttctacaactctgtgtacaaagtctttcaattaggctctagaagagtgtggtacatagatgaattttgatgaaaaagataagaaatatgagcagcatagttctcagaggaagaatagagatgaaagagataagcaagaatagtatagacaggtgatcattcaattcaacagacaacttttttttgagatggagtctcgctttgtcgcccaggctggagtgcagttgtgccatctcagctcactgcaacctctgcctctcgggttcaagcgattcttctgcctcagcctcccaagtatctgggattacaggcatgtgccacaatgtccagctaatgtttgtatttttagtagaaacagggtttcaccatgttggccaggctgggcttgaattcctgacttcaagcgagccacccgcctcaccctcccaaagtgctgggattacaggtgtgagccaccacacctggcttcaacagatactttcagaatgatacactgttgaaccctgggtgagtactgggtatttcaaaaagaacttagacatggttttcttgataggaagtttcacctggtagaggagacagataattgatacatagatagatagaaaattattcaaatgtcatatgataaatactaaagaaaatacgggtgctcttagatagatgaaagaacaatagaatttgcatgatggtttcaagaaagacttcacagaggagcaggcatggtggtgtgcacctgtggtcccagctgcttaggaggctgaggtgggaggattagttgagcccaggagttcgagaccagcctgggtaatagcaagaccccatacctgggaaatgactagagatcaacctgaaaacgtggactggattcaggttgataggcctgtgtaagccatggaaataagttttgggttgaagcactttttttcttttttctttttctttgaaggattttaagcaaaagagtaaccttccagaatggaatttggatggagtggggaatagggagagcagataaggaggctcttggagttgtctagcctagagatgggtcttaaatagggcaggaaaaatgaagatgttaagggtacagttcattgtgacaagttggcgcatgtctaccaccctgatgcctactaggggtctatttgtaaatgggtagcctagttatgttacatgacttggggatggaaagtacagacataatataggaacacatttctttaaccactgaagtctattggagcataatcaaatttatactaatggaaatctctttccagggctgaagctaagtaatgctgtggtctagcttgtcactttatgaagtttctgaagatttaggaaattaataaaatgagtaaaagttgtatgaacttaagcagcaggggctggggtgggcggtctgtagtctttttcttttttattattttttatttttttgagatagggtttaactctgtaactctgttgcccgtgctggagtgcagtggtgcaatttcagctcactagaacctcaacctcccaggctcaggtgatcctcccacctcagcctcctaagtagctgggactgcaggcatgtgccaccacacgccaccgcgccccaccacactcggctaatttttgttgttgttgttatttgaagagagagtctcactctgtcacccaggctggagtgcagtggtgcaatctcggctcacagcaacctctgcctcctggattcaagtgattctcctgcctcagcctcccgagtagctgggagtagctgggactacaagtgcacgccaccatgcccagctaatttttttgtatttttagtagagaggggttttgtcaggttggccaggctggtctcgaactcctgacctcaggtgatccacccacctcagcctcccaaagtgctgggattacaggcatgagccaccatgcccggcctaatttttgtgtctttcgtagagatgggatttcaccatgttgccctggctggtcttgaactcttgggttcaagtgatcctcctgcctttgcctgacaaagttctggggttatgggcatgagccactgcacccagctgtgtctgtattcttcacagcatgtaattttctacacctttcttttagcttctgattagcaagcctgactgattggttaagctaaaagagcagagtaggagagatgcaccagcatgggacgtggaagagaaggaacaaagtggacagggcagattgggtttcaaggatgaggtattttcttttcttttttttttttttttgagacagggtttagctctgtctcccaggctggagtgcagtggcacgatcttggctcactgcagcctccacctcccgggctgtagccgtcctcccacctcagcctcctgagtagctgggactacaggcatgcactacaggcatgcaccaccacgcctagctaatttttgtattttttttttttgtagagatggggttttgccatgttgcccagactggtctcgaactcctgagctcaagcaatccacccaccttggcttcccaaagtgctgggattacaggtgtgatccaccatgcccaggcgaggttttttttttccaactattcgggaagaagattaccgtattcagaacttaggggtttaccactaaagtgggtttatatgaaattttaggattaggttatagtacctggcatataataagccaatagatacatggatacattgaaaagattgctttagagcagagtgatggcctaggagaagacctagaatgtcctagggaaggtcaaacaaccaaaacaagagagggtctctgtcattcatgcaacacaggtattttgagcatgaaccagtatactagactgagattaaaaagtggatgatatgtctccttaagtccagtgtggtttggaaggcaagcatataaacagttagttacattataatgtaagtgttataaaataattgtgcacacccacgaagtaggcaacgagctgcctagagaggttaagtatattttacagagaaaatgacacctgagttggttcttaaatgggtacttgtcagggcaagaagtaaggacaagacatttctaggtagaaggaatagagtatgtaaaagccagaaagtaggacagagtgtacgatgtttttacgccatatatctttgaggacaaggtctcacatgcagttttagaacgtgtttagctacgtttgaatgtgacaagtacctatacctccatttggtggaatagaagctaaggtttggagattgtttttttttttttttgagatggaattcctcttttgttgcccaggctggagtgcagtggtgtggtcttggctcactgcaacctccgcctcccagtttcaagcaattctcctgcctcagcctcccgagtagctggattacaggcatgcgccaccatgcctggctaatttttgtatttttagttgagacgggatttcaccatgttggccaggctggtcttgaactcctgacctcaggtgatccacctgcctcggcctcccagagtgctgggattacaggcgtgagtgactgcaccaggccggtttggagattttaatagcttcatgtcatgcagcatgagtcagaggcaagagctcagaccaggtacccaaaaacaggaatgccaaatctcgtgccctgagtaattctgtgtcgtagtaatagattgctgtggattcatgagtaatttggggttattttacttccttggcaccaaattacacactcaaaattgacattgttgatcctatccaatgttcttctttttcaagaaaaaaaaaaaagtgggctgggcacggtggctcacacttgtaatcccagcactttgggaggctgaggcaggaggatcacttgaaggccaggagttcgagaccagcctggccaacatggtgaaaccccatctctactaaaaatacaaaaaatgtagctgggcatggtggcgggcgcctgtaagcccagctacttgggaggctgaggcaggagaatcgcttgaacccaggaggcagaggttgcagtaagccgagagcacgccattgcactccagcctgggcaacaagagtgaaactccgtctcaaaaaaaaaaaaaaaaaaaaaaaagaagtgggggctgggggaatgttaataaacatttacttctgccatgtgaggtaggaatggatgatgaagtgttcaaggctccctactggatgtccacttaatttgtatctttagaagttgacttagtgcttttctgaggtcatccagtaactttcccatttaatgcaaaataacaagctagtcactgtcttgaggagacacgttgtttatctttagtagttattttgcagctaggtggggtaaatttgcccagaactcctacaggatatgaatcatttgcattcatagactgacctgttctcactttgttctttctgaaaagagttttaatacagcctgtattatataacataggggatacattgtcatttatattttcagcatcattctcaagtcaatttgcagactctatgataaacctgagaacttgagttgctatgattaacatctcatgtacattcaaataaacaagcaaactgtagaataaatcccagaaaatgttattagctttttgtacacgttatttgaggtctttgaatattgcgggagagtattggaatagaggacagagtgcagatggcaacacggaaacctgcaattactgatgtttttaaaaatgtgtgtcatagaccaagcttggtggctcacgcctgtaatcccaatgctttgggaggctaaggcgggagggttgcttgaagacagaagttccagaccagcctgggcaacatagcaagaccaaccctgtctctacaaaaaaaaaataaaaagaaaaaagaaaaagttagctgggcatggtggtatgcactggtacttggaggcctgaggtgggatcacttgagcccaggagtttcaggttgcaatgagctatcatcacaccactgtccagaagctgggcaacagagtgggaccttgtcttcaaaaaaaaaaaaaaaaaaaaaattgtgtgattaactttcataactttccatttatttatttattattttttttagacagaatctcactctgtcacccaggctggagtgcagtggcgcaaacgtggctcactggagcctcaacctcccagcctcaagcagtcctcccacctcagcctcccaagtagctgtgactgcaggcctgtgtcaccatacctggctgatttttttttttttttgagatggagtctcacactgtcacccaggctggagtgacacccatggtggcgcaatctctgctcactgcaacctccacctcccgggttcaagcgattctcctccctcagcctcctgagtagctgggattacaggcgcccgccaccatgcccagctaattttttgtatttttagtagagacagcgtttcaccatgttggccaggctggtctcgaactcctgaccttgtgacttgcctgcctcagtgtcccaaagtgctgggattacaggtgtgagccaccacgccaggctgttttttttttttttttttttttttttttttaagagaaaaggtcttgctgtgttgcccaggctggtctaaaaatgctggcctcaagcgatcttcctgcctcagcctcccaaagtgctgagattacaggcatgagccatctcacctggctaaaatgttattttatacaagtattatatttcttgttagagtaatctgagcgcttaattgacatatttggaattaatcagaaaggctaatagttatataaatatattggattgtttgtgtgagactaattcttggtaaatgaacatgaactacaagaaatggtcgacattagtgctgataaattctgaatctttacatgaagaatatgtgtcacagctgagtgcagtggctcacacctgtaatcccaacactttgagaagccaagacaggcaaatcaccagaggtcaggagttgaagaccagtcttgccaacatggtgaagccctgtctctactaaaaaaaaaaaaaaaaaaaagccgggcgtggtggcgggcgcctgtaatcccagctactcgggaggctgaggcaggagaatcacttgaatttgggagaagattgcagtgagccgagatcacgccactgcgctccatcctgggcgatatagtgagactctgtctcaaaaaaaaaaaaagaatatgtgtcagaagagagaaagggaggtatggccttaatgctattttaatttataagatagaggcctggtattcttggattctggagcctatcaagacatttcaaggtataggtttgaattgaaaaagtatggaaagataagatgagctttcaagagggatgctgatcataagtctttagggtttattgtctctgtgactatggtcagaccagcttcactgtggaactggaacttaagaatgaaaaaggcagcatgctttccaactgcctgactgcttgttggcctcaccggtgggagctccagcatctcctttgctcgaaatggaccccaactgctcctgtgccactggtggctcctgcatgtgcgccggctcctgcaagtgcaaagagtgcaaatgcacctcctgcaagaagagctgctgctcctgctgccccgtgggctgtgccaagtgtgcccagggctgcatctgcaaaggggcgttggagaagtgcaactgctatgcctgacgtggggacagctctgctcccagatgtaaatagagtaacctgcacaaacctggattttttaaaaaatacaacactgagccatttgcttcatttctttttatattaaatatgttaatgacaataaaacaatttttacttgaagaaaaaaaatgaaaaaggctgagtgcagtggctcacgcctgtaatcccagcactttgggaggccgaggagggcggatcataaggtcaagagatcgagaccatcctggccaacatggtgaaaccctatctctacaaaaatacaaaaattagctgcgcatggtgatgcatgcctatagtcccagctactaaggaggctgaggcaggagaatcgcttgaacccgggaggcggaggttgcagtgagccgagtcgcgccactgcactccagcctggcgacagagcgagactccatctcaaaaaaaaaaaaaaaagaatgaaaaggtagcatggtggctcatgcctgtaattccagcactttgggaggctgaggcaggctgattgattgagcccggaagtttgcgaccagcctgggcaatggggcgaaaccccatctctatgcaaattacaaaaattagccaagtgtggtggtgcgcacctgtagtcccagctactctagaggctgaggcaagaggattgcttgagcctggtatgcggaggttgcagtgagccactgcattccaccctgggtgacagtgagaccccatctcaaaaaaaaaaaagaaggaattaaaaaataaactttagtttttgccatagctctttatttcactaatgtcctcttccttcgtataaacaaatactaatctctctaaatatagcaaactatcaaaaggaaatagttttgtaccctgttatttatgaaacttattatgacaaactactcctaaagcagcttcagctatgattgaataaatgctggaaatccaggataaataagatactccacctccactttttaaagtaaataaatgatttgtgtttttggaatctcaagaaatttatagccaggcatggtggctcacgcctgtaatcccagcactttgggaggccgaggcgggtggatcacctgaggtcaggagtttgagaccagcctggccaacatggtgaaaccccatctctactaaaaatacaaaaaaaattagccaggcgtggtggcttgcacctgtaatcccagctactagggagtctgtggcaggagaattgcttgaacctgggaggtggaggttgtagtaagccgagattacaccactgcactccacaatccagcctgggtgacagagcaagactgtctcaaaaaaaaaaagtttactttctcacatgggatatattttacagttggtcaaatgtgcttgtgtgtgtatatgtgtgtatgtgtattcttttctctgtatcatatgtgatagtggggtagtgccaaacattgttaactctgatgaataatgtctcttttggttagatcattcttaccttactggtatctcttactgtttccttacctagttatgctgttattgcctatggctgtgccagctgcccgaagctaacttgtgagagggaaggttgccagactgagttctgctaccactgcaagcagatatggcatccaaatcagacatgcgatatggcccgtcaacagagggcccagactttacgagttcggaccaaacacacttcaggtctcagttatgggcaagaatctggaccaggtataagttggcattatctcattgtctctttatttggtatttcatgatgtgagcccatagctgaaagaaattatcttattgtataacccaagtactccaaaggatcagagagcagaaaatatcatttgataatactttcaatattataataaagatagcacttccctctctgaccattataggttatccaactatataaaattgaaatgcaacaaaattgaattatgtagttcctactttcttagtaatatgtctcagattggagagcaattagttcattttgttttgctaggggctttttcaaaactttcattgtgaacagaaagacatttaattagtattaaacctgtgctgtttgccttcaagctgacttaagtgcctcactgcctttggaagtagagtacagattgaagaaaaggaaacagtattagtatagattaatgattaaccttaaaaggaggaatgtcacacattcagctccaaccttggcgagtcagaggaaacctattttaaaatgtcagtggatttattgctttgtacttttattttgctgatgtcatttgggagaggctagtaggaaagattttgccattcactttttcctggcacagcataatttcctaaattgtcattttattaggatagttcataacttgctctgaaaattaccaagtatatggtagatagcatacccagttgtttttaggttttgaatttgaaagtatcatgggaagggattgtgggctatgttaacagcaaatcacaatgatacatgttgaacctgaaaaataaatttcccaaactaaagtttttaaaaatgtaaagctaattccaggctgcaggctattctttctgtaggattcttcttttaaatctaccagcctatcgactggtagaaatttcatttttcttggaaacatctttctccctaaggaaatctccttgctagaatgtggttcaagtgctgtgtaagatgccagttgttgggataggcagctcaataagagacaggattcattttatgaaaattcctgaggtctagacatagccaaccttccagtaaagtgggttgtacaatttggagtgttcagtgaagagttcttgactgctgcctcatttcttatatatactcctaggaacaattaaatcaaactggatttaactaggggtattttttctacccattcttcccccactcatagcagatgacatcaagccatgcccacgatgcagtgcatacattatcaagatgaatgatggaagctgtaatcacatgacctgtgcagtgtgtggctgtgaattctgttggctttgtatgaaagagatctcagacttgcattacctcaggtaagatgggaaatgcatccattcctttcgtagtctcattctcttactgatttagggaaaaggatgtcaaaaagacacatccgttctctcattacaggtttaaggaagctgtgaaaacttcttctgacatgctcctctaatcatgttttcaccagctactattctgtttctacctttctttgcttgccatattacaggtagtctggacttgctttttcccttttgctgtcttgcctccatacttgttcatgttctttcctttgcctagaatgctttctgcctaccttccagtatcctccttttatctcaacttgttcagttcttatcttttaagagccacttaaatgcctttcatccatgttgcctctcctttttccgcctcattctttgactttcttttatcttttgtcataaatatcgtcagtactttacacttcacgtacctatcttatcttactaaactgtaagtatcttgaggctagagttgtgacctttttacagttttttgcatttagtgagttcccaaggaattcattaagtgaattctttttttttttttttttaagacagagtttctctctgtcgcccaggctggagtgcagtggctcgatctcgactcactgcaacctccacctcccaggttcaagtgattgtcctgcctcagcctcctaagtagctgggattacaggcacctgccaccatgcccagctaatttttgtatttttagtggaggcggggtttcaccatgttagccagcctggtctcgaactcgaacctcaggtggtccgcctgcctcggcctcccaaagttctgggattacaagcgcgagccaccgcgcccagcctcattgagtgaatattaaaatgttgtggaggagttaatatttacaaacaaaatgtttgctaatatttacaaataaacaaaatgtgttaatatttacaaacaaacattcattgtgtaaatgaaacacaacaccttcattgccaatttgtcgaacatttgagtacttactgtgtgctagtcattggggacataggggtgagtaagacatgatccctattttcaaaattgtttatcccttctagtggagaagatagcacaaagagaatgggcaaaaatggttgggcacagaagggctgactgtaaaagtagccaaactcagaataccaaactgatagaaaggttatgatgaggtctttttatatcctctcccacgaacatggtttgcagtatctattaggtatggtaggacatatgccaagaaaactacacaaatcagagtgttcattagtgcagggtgcagtgtgtctggatgggatgtcaagtgcataaggctatgcagcatcccaagtattgtcagtcatggaagctagatcagttttggtgggttagggaagacagaattcagcagagaagaatggaaaaggaatttcaagtctggaagcctgtctttacaacaacaaccaaaaaagttaaagagcccagagctctaatagtctggccttgtcctttgctctcccttgtgtaatgtattcatttcccataaactcttctgttaatccttactgaaaagaaggctgttgctgttatcaagccctatgataatactagctgtatttgtaatgttgacattaacttcagtctgtttcccctgcagcccctctggctgtacattctggggcaagaagccatggagccgtaagaagaaaattctttggcagctgggcacgttgattggtgctccagtggggatttctctcattgctggcattgccattcctgccatggtcattggcattcctgtttatgttggaaggaaggtaagaaagacatgctggtttctgtgcttgtttcaactttaggttcgttagtaaaggtttgagggaaatgggaaggagctatgtttcagagctgcctgaaaaccagctggttcttagataaaaataaccttactttcttaaatggattttcataaacccccatgagatctgaaagttcttattaacatcctgggcctggcttgtctcagtgacttaaaggtagaatgctgggccaggcatgatggttcacatttgtaatacgtggcctagcactttgggaagccaaggcaggtagatcagttgagcccaggtgtttgagaccagcctgggcaacatgacaaaacccatctgtacccaaaaaaatagaaaaattagctgggtatggtggcatgtgcctacagtcccagctactagggaggctgaggtgggaggattgcttgagcccagggacgtagaggttgcagtgagccaagatcgcaccactgcactccagcctgcatgacagactccaaaaaaaaaaataaaagaagaaggtaaaatgcttacttcattctgctggagttattttgtctctttttggattaactttgcctgtattactttatatcttccaggtctgagttaggttaaaatttgataaagatgcctatttggggtagaggatatgttttaatatagataacttacaagtgaatattcacctgtcctttttttctctggcaaaagattgatgtcctaacctgctgacctggattttctttttttattcttagattcacagcaggtatgagggaaggaaaacctccaaacacaagaggaatttggctatcactggaggagtgactttgtcggtcattgcatccccagttattgctgcagttagtgttggtaagctagtcaggaccacacctcttctctctcagctttctgaccatagcagtttagccagatggccagatgtttctcaaagactcctacattttatgcgaacccaccttgatagtaaattctgttaggcaccatgattatgattatttttaagtttttcaagcacaccaaattatcagagtgtgcaatcttttgttcttaagttagtgcctagaactccatttggcacatagaaaaggttgaattacagaaacttattttaagccctagttttcacctttcatcttccttctctacttgccatgaaatccacaaaacaaaattacttttgttttgatttgtttaatgcttcacattactttgggaggcataagagtttgttttagaataataatagtgtaactaacatttaatgtggctcttcatgtgccaggagtggttctgagacttttgcatatattaatttatttaatcctcacaatccttacaaaaggaagcacaattttaatagaaaggtgcagtaattggctgggcgcagtggctcacgcctgtaattccagtgttttgggaggccgaggcgggcggatcacgaggtcaggagatcgagaccatcctggctaacacggtgaaaccccatctctactaaaaatacagaaaatcagccgggtgtggtagcgggtgcctgtagtcccagctacttgggaggctgaggcaggagaatggcgtgaacctgggaggcggagcttgcagtgagccgagatcgtgccactgcactccagcctgggcaacagagtgagactccgtctcaaaaaaaaaaaagaaaggtgcagtaattttcccaaggtcacttagctgggacatgaatcaagttaatctgccttcagatcctgttctcttaacagctaagccattctacctcacacagcagtaagattttggaattaacatcctgaggagatcctaaactccaagcagtagtcacttatttaatatttgattcttgattggctcttgattgggttagcatttcagcagtgattagaagaggggaaaatgaaagcaacatatatttactgtgcaaaacacagtacatagcattctcatttgattattgacaaccctgggaagataggtccaaggttatacagctagtaaatggagccaagaatctaatccagacctttctgatttctagcctggtcatcattctgttacaccaggccacctttttgggatagccactttctgtcttcctttctttataaagtggtttgtccatgcccagactgggaagaagaattcagggcacttgcaacctaatagccagctgacatgtttccttctcttcccccaggtattggtgtccccattatgctggcatatgtttatggggttgtgcccatttctctttgtcgtggaggcggctgtggagttagcacagccaacggaaaaggagtgaaaattgaatttgatgaagatgatggtccaatcacaggtaaaaagcaggatgtttatttccatttgaatttatgatatacaagataaaaatcagtaaaattcagcgcattttacagggagattgtcattggattactttggataatgagctttgtagggggtaaagtatttttagcttttcatttctttgttccaaagttattaggttaattcccctggtacttgcctctgtgtggcaggtacaaactagtaggaatccaagtaactccaagtatgctggtagtagtagtgattataataacatctttatatctgcacagtacttgataattttcagagtattttacacaattatctcacttgctttttacaacaaacagctctctgacgagggaggatggagctgttatccccatttaaatgggaatttctttttttttttttgagacggagtctctgtcacccaggctggagtacgatgtcgcgatctcggttcactgcaacctccgcctcccaggttcaagtgattctcctgcctcagcctcctgagtagctgggactacagcaacgtgccaccacgcctggctaattttttttttttagtatagacggggtttggtgtttcaccgtgttagccaggaagatctcgatctcctcaccccatgatccgcccaccttggcctcccaaagtgctgggattacaggtgtgagccaccacatctggcctaaatgggaatttctttaagctttcatcttactatctattaagagcttcacagagctgagactagggcaagtcttctgacttttactttaatgtggtttctactcgtagtaagtaacgtagggcacaagtaacgtagaaaaccccaaaggtttttctagcttccttttttcttttctttttttttttttgagacggagtcttgctctgttgcccaggctggagtgcagtggcatggtcctggctcactgcaggctccggctcctgggttcgcgtcattctcctgcctcagcctcccgagtagctgggactacaggcacccgccaccacgcccggctaaattttttgtatttttagtagagatggggtttcaccgtgttagccaggatggtctccatctcctgacctcgtgatccgcccgcctcggcctcccaaagtgctggaagtacaggcgtgagccaccgcgcccggccggtttttctagctttctactagaagcttcctattaaaatcagcacatgacccaaacatattttttaaatcttcacgtttggttacatggaagcaacagtgtagtggaaagaatagtggccttggaatcagagttatagtttcatgtaactaccatggccttggacaagtcatttagttttaaattttagttttctcatctaaaattgaggctattaatgcctagttatttggaggattaaatatgaacatatgttaaaacacctgatatgtggcgactgcacacagtacctgttcattaagtaaatacattagttctctgaaaagtcattgcaggaaaatgcctactgactgttttgatgctctgctgtcttgaattggatgtttggttctatccccagtggcagatgcctggagagccctcaagaatcccagcattggggaaagcagcattgaaggcctgactagtgtattgagcactagtggaagccctacagatggacttagtgttatgcaaggtccttacagcgaaacggccagctttgcagccctctcagggggcacgctgagtggcggcattctctccagtggcaagggaaaatatagcaggtaaacaaatagataatttctgacagaaatggttagaattataagaagtaacacattgagccatttctctgtgccaggcttgtgccacgtatcatcttattttgatttaattgtcaatggttttgttttgttttgtttttacttttttatttttaaagacagagtctcactctgtggctcaggctggagtgccatggcgtgatctcggctcactgcaagctccgcctcctgggttcaagcgattctcctgcctcagcctactgagtagctgggattacaggcacccgccaccacgcccagctaattttttgtatttttagtagagatggagtttcaccatgttagctaggatggtctcaatctcctgacctcgtgatccgcccgccttggcctcccaaaccgttgggattacaggcatgagtcactgcgacaggcctttttttttttacttttacaaataggaaacaagcttagaaaaaaaggttacgtcagttatgcaaagttcattgttctttccattgcaccatagctgcctctatataaagaataatcctgacttgagattcccccttgactgcctgaggctgcctgcttcaggaagggagagtaggcatttttatagaattcgtaaaatgctctccgttaggcttgtcattggctttcagtagcatttatgctgtatcatggcttatttattttattttatttttttgagacggagtcttgctctgtcgcccaggctggagtgcaatggtgcaatcttggctcgctgcagcctccacctcctgggttctagtgattgtcctgcctcagcctcccaagaggctgggactacaggcgtgcaccaccatgcctggctaatttttgtattttcagtagagacagggtttcatgttggccaggctggtctcaagctcctgaccttgtgatccacccgcctcagcctcccaaagtgctgggattacaagcatgaaccaccacacccagcccatcatggtttattgatagtgggctttggggatttttttttgttttttttctcactgtgtcatccaggctggaatgcagtggcacaatcatggctcactgcagcctcaacttcctggactcaggcaatcctaccacctcagcctcctgagtagctaggactacaagtgcacacaccacacccagctaacattttaaattttttgtagagatggggtcttgctcggttacccaggctggtcttaaactcctggcctgaagccatcctcccaacttggctcccaacgtgctaggattataggcatgaaccattgcccccagctggtttagtgatactgcaatccttattacctttctatttccatttgctagataaggaaaatcaattctatgtacttgtgttgaaaatatgtaaagctttgtaactaaaaagattgtgacttgcttggtcatttcactagttaggcagaccagagtgtatattttcagaggagcataacatgttgcctgagaagcagttgaatgcaacggagaagaaaggcctagggaggggtaaaggtagaacaaagcaggataggaaggtagaggagatggttgccttcagctatccaaaggaccttcaactgtgaaaaggattagacttctatgcctcataccaaaaggtagattaagatgacttggcagaagctaaagggaaactaattttggttcagtatagagaatatagggaaaagcaacatgaaagcccaaagaggaaaaaggctactttagtagatactgagctgcctatccctggaaatgtttacaatgagaccagatggctatttggctataagaaggattcaagcaacagatggcaggtggactggatctcccacctgagtgcctgtcaatcacttgggagcctcttaaaaatagacttcagggacccatcccagaatgagtagcttagaatttcctggagtggcacctagggggtgatccgtgttttgcaaaagctccccaggtaattctagcacagccgttgcatgaaccagcatctgacaaccacctaagtaggagccctttctgaaagactcttccaactcagagtgattctgtggcagacctgaaactagaagccaggtctctgacactgtgcactttccattgcattccctcatttccctgggccttggcacatttttgaagggcacctgaagctggagcagcaaagcaaaggctcaggcagtaggatggaagctgcttgaatgtgcagctgcaggctgctactgacccgtctgtgcatctcatgactctggttgtctcttatcaggggatcccgcccccacatgctggcatattcactgctgtgctttcttaaaaccaacacccctgtaaataagcagacagacataattggagactgacttgctgaaactgcagcttagccagtccagctgttctagttctgtgaaagcctttattttataggaagtgaatgagtcagatgggtttgactgtgaaacccattataaggaaatacttaactgtgcaacaaagtgatgttggagccaagaaaggcaatagttatgggctctgagacactattgggaaagtttgctgctccaagaggagggaagaggttggctcctgtatgtccttcagtctcattccctggaggtaatttgattgttaaatgtttgatttcctattatgtgcaaggcagggaaggtaaagtgtgtatgagttgtggtctctccttttgtggagttaacagacaagtgagagatgcataataataagtaggcagggcctgcgcacgcctgtaatcccagcaccttttttaggtgggtgatcacctgaggtttagagttcaagaccagcctggccaacatggtaaaaccccatctctactaaaaatacaaaaattagctgggtgtggtggtgggaacccataatcccagctacttgggaggctgaggcaggagaatcgcttgaacctgggaggcagaagttgcagtgagccaagatcgtgccactgcactccagcctgggtgacagagtgagactccctctaaaaacaaataataataaataagtaggcaggtgctgtgggagtacttagcaagaagtgaatggtttgctgggataatgaggggaagtgatagttcctttgttgttaaggactgagtataagtttgtctggtagagaaaggaaatttctagagagacagaatagcatgtgcaaagtcatggaagtataaaatgtataggtatttaaagaaagaaagaattcagagtgactatgatttcggatctatagggagtgatagaactggacagagagcttcctggcagatcaggaagaccttaatgcctgttggcagtagggagccaagagttagagaattgttagagtgattgggtctttattcacactggcactgttctagaggttgtttgacttggacttaagggctactggagagggagcccagttttagtcatccaggcaggagatgatgaaaacctgaagttcagcagtagctgtggggatagaaaggaggggacgatttcaatagatatttaagagaaaaaatgtatgggcatctatttgcgctgtttgacagttggagaagatcagacagacaaccacaatttgcaagagagtaatggaagagatgtgtgccaggaagcagactgtcttggaatacccaggtctcatattaacttgaacgtcccctctttacacaggttagaagttcaagccgatgtccaaaaggaaattttccccaaagacacagccagtcttggtgcaattagtgacaacgcaagcactcgtgctatggccggttccataatcagttcctacaacccacaggacaggtatgtgaacagtcagatgtccaggagaggttgcattttttcgttgggtactaggtcttcagaagttcaatgcctcatgttagggctgtatgtaccatctcctgggatatatagtgtaacctgtgaattcatttgagcaagttcttggtacttgagtgtttggcatctcttgattcttcttgttagcgcttgatttttagagatttcttttctttcttccttttatgtattttttcttttttttttttttttttttgtctttcttggctattgcaacagtgtataattacatggaacttaaagagctagattgatgttcattgatgtcttcaagtctagggtttctgcttgccctttgcttgataggattcccatagcttctttctctttcattttgagaaactggtgtatctgggatggtgtgattgtggtactcccactagtaggtattctggcttcttctacttgtggcatggtagtaaaaagcttttacttttctattttgagtaagctagcatggggctctgacccttagttgaattttggaagctctttctgtatgtttaaagagattggctgagatacacgtgtgtgtgcatctgagcacacgtgtgcatgtatagttaaatcagcaaaaaggatctaattactcttctccatctcatttatttttatttttgtttttttagagacagggtcttgctctgtcaaccaggctggagtgcagtgacacaatcataactcactgcagccttgaactcctgggttcaagtgatcttcccatctcagcctcccgagtagctgggactacaggcacgtgcctccatgcccagctaattttttttattttagaaacagggtctgactttgttgccctggctggtctcaaactcctggactcaggcagtcctcacacctcgacctcccaaagcgctggggttataggcatgagccaccacgtccagcctccatctcatttgagtgttagattaaaatgttatttttgttaaaagtgagctctagttaactgttcacctatctttttgaaattcctaatcctgaacccatgaactgcttttaccaacaggtttagcatgatccatgcatgactcagcaaagtggattttgtctccacagagaatgcaacaatatggaaatccaagtggacattgaagccaaaccaagccactatcagctggtgagtggaagcagcacggaggactcgctccatgttcatgctcagatggcagagaatgaagaagaaggtagtggtggcggaggcagtgaagaggatcccccctgcagacaccaaagctgtgaacagaaagactgcctggccagcaaaccttgggacatcagcctggcccagcctgaaagcatccgcagtgacctagagagttctgatgcacagtcagacgatgtgccagacatcacctcagatgagtgtggctccccccgctcccatactgcagcctgcccctcgacccccagagcccaaggtgcaccgagcccaagtgcccatatgaacctctctgccctagccgagggacaaactgtcttgaagccagaaggtggagaagccagagtatgaagtggaatgaatgctcctgttctgagaagcacacttgtaactgcatcttttggaatttttttttttttttttccaaggggtagagatttatgtattttatttcacagattctctggtcacaggtttttgcccagggaaattctgagaaattcacaatttcttaccagataaaacatgaaaagtttgccgttagttcccctcccctcccctccctctttttagttttaatttattggttaaactgatggcagcaatccatgaggtgtgtcaaagagtgtacatatgtatgtgtgtatattgaatgctaaacatattactgaaagacacattttaataaagatttctgtcataattcaactt

SEQ ID NO: 122 - DNA, 4175 bp, Homo sapiens
gttaacgttaatagattctgccaaattatcttgcaaaaagcatgcagcaatttaagttgcaggcagcgtgtggacgcctgtcttcccgcattccagctcaaagccagcaatggctggggtcgatctgggagtgttgggggtaggggcaggtggagtcactgcttaatttgcatgattctggttattcgtgagatcagtttttttttttaatcgcacttatgcttattgtttattagcgtttcctcccatctttgcctgaagtctccggggactgcctttgggggtcgggtaaacttgtcccctgcgaagagggcccagggttggggtctggaaactccgaggctgcacttgccagcggcctcttaaggccacagcgtccccgtggtttctggctcgcagccccccgagacccaggacttgtccaaggtcagggcaccgcgggtgcccccgggctgggccgcagccagactgcgcttcccgcgcgccttcgctttgcaccaggatcgcccaggaaacgcctgcgggcaccttgaggaaggtcggcggctccgggccagctcgcactggccgggggtggggcgggggccgtacctgctgcggaagccccgaaagctttcgcccggcccctcgccgccgccgcgggggctggctggactaggcgggcaggctcgaggatgcggatgaacccaagcgtcctcgagtgcccggaggctctccgcctcagtttcccgcccagaggcaagggcgtgcgaggggatccagatatccaaggacctgaggtttcggcctcgaggtcttgggcgggggactgggcaggctgcgcggggtcccagcgaggggacagctcgggtgggcggccagggtgttgggggctgcgggcggcggacaaagcggcggcaccaccccgcggcgcgggccaatggaatgaatgggctataaatagccgccaatgggcggcccgcgttgtgccccttaagagccgcgggagcgcggagcggccgctgttcgcctgcgtcgctccgggagctgccgacggacggagcgcccccgcccccgcccggccgcccggtgagtgggcccgggggccgggggcgtccgcgcccgggctaggggcgctgcgtgcaaagggggcgcgtcgcctggagcgcgcgccggaccggccgggggtccccggcgatgatggcgctccccgcgcgcgctgcggaccccgctgaccttggccgcgtcccggggggcgccggggggcccggcggcgggggcctgagtggtacgcgggagcccgggaaccccggcgtgccggtcccctctgaccccgcgtctccccgcagcccgccgccgccatgcccttctccaacagccacaacgcactgaagctgcgcttcccggccgaggacgagttccccgacctgagcgcccacaacaaccacatggccaaggtgctgacccccgagctgtacgcggagctgcgcgccaagagcacgccgagcggcttcacgctggacgacgtcatccagacaggcgtggacaacccgggtacgcgacccctcggggccggggtcccggccccccctccccccgcgcagccgcagggtcctcagcagcgcgctcgggcccggcagtgacgtcactgtccccgtcccgcgccccctcccccaggccacccgtacatcatgaccgtgggctgcgtggcgggcgacgaggagtcctacgaagtgttcaaggatctcttcgaccccatcatcgaggaccggcacggcggctacaagcccagcgatgagcacaagaccgacctcaaccccgacaacctgcaggtgcggggctgcgggcgggccgggcgggcggggccggggtcttcgggcgctcactcccgtctcgcctcccagggcggcgacgacctggaccccaactacgtgctgagctcgcgggtgcgcacgggccgcagcatccgtggcttctgcctccccccgcactgcagccgcggggagcgccgcgccatcgagaagctcgcggtggaaggtaggggccgggcgggccgaggggcggcggcggccgcgtccccctcccggcgcggtccccgcccgcttttgtttacgtcgcccgggagcggcagccgccgtcgcgctcttatctgcgcgcgcccgggttcagtttcccggagggaccgagggacggaggcccagccccgcgcccacagcggcctggggcccagggagggcgggtcctggcgcggggtcaccgcctgggaccgtcgcccgggccgtgaggactggacgcccgcagatccgggcgggtggggccctctgacgtcccccgaggtggggcacgggggcgggcgggtccgcgctgcgggctggaggggcgggcgcgggagccgagcgtcctgagcgcacccctcgcagccctgtccagcctggacggcgacctggcgggccgatactacgcgctcaagagcatgacggaggcggagcagcagcagctcatcgacgaccacttcctcttcgacaagcccgtgtcgcccctgctgctggcctcgggcatggcccgcgactggcccgacgcccgcggtatctggtgcgtgtccctctgcgccctctcgcggcgtcctccctccccgctacctccgctttccctctcgcccccctcgcgggggtggggcccctcgcggcgaggaggaggaggaggaggagggaggggccggccgcgctccgggtctgggttccgtgccgcgcctcctcctgcgccggtgaccttggccgagcaggtgcgttaagggactgggccccggcccgtgggggctcaggactcagcaacacctccccaccccgagacgtgaggtgggggcggggctctctggcgcctctccccgacggccctgggagctggagctctttgttttcttttctcactcctccgccgctgggattctaccaggggctggtgacgccaaagcttctccaggggcagggctcctacccccactgtggggggcgggtcgggctgtcctggcggtccctggccccgccccacctcaggccacagcgcatgatggcagctggggttctcctgctgtgaggcgtcccggttcccccgcccgccccgtgttggcgggtggagtcttggcagcagcctccactcctgggcatggcagggagcagcacctcagggacttgggaagttcctttggtctgggggcggcctggggcttttttctgggtatgccctgagaccagccctcccgcaggcacaatgacaataagaccttcctggtgtgggtcaacgaggaggaccacctgcgggtcatctccatgcagaaggggggcaacatgaaggaggtgttcacccgcttctgcaccggcctcacccaggtgccagggacggggcaggcccagaccccagggccccagcagggatgtgggtgccccagcatcagtccccccgggggatttccggcactggggagtctcagggcctgtaggggtttcaggcaggccttctccctcataccctcttctccgtctgcagattgaaactctcttcaagtctaaggactatgagttcatgtggaaccctcacctgggctacatcctcacctgcccatccaacctgggcaccgggctgcgggcaggtgtgcatatcaagctgcccaacctgggcaagcatgagaagttctcggaggtgcttaagcggctgcgacttcagaagcgaggcacaggtgagcagggcaggtgctgcggcttcccgtggcctttgggcagccctgtttcctccgccctgacttgctgtctccccaggcggtgtggacacggctgcggtgggcggggtcttcgacgtctccaacgctgaccgcctgggcttctcagaggtggagctggtgcagatggtggtggacggagtgaagctgctcatcgagatggagcagcggctggagcagggccaggccatcgacgacctcatgcctgcccagaaatgaagcccggcccacacccgacaccagccctgctgcttcctaacttattgcctgggcagtgcccaccatgcacccctgatgttcgccgtctggcgagcccttagccttgctgtagagacttccgtcacccttggtagagtttatttttttgatggctaagatactgctgatgctgaaataaactagggttttggcctgcctgcgtctg

SEQ ID NO: 123 - DNA, 11653 bp, Homo sapiens
attcttgtcacatcgacttggaaagcttcctcccagtttcctctctgctaatggggatccttccaggccccactctgatgtcctatccatgttcatgctctcccagtccccatcctcagcagtagaccctcaatgcctggtctcactcccggggctcagctccaactgaccttgaaacgctgaggaagggagcgcagaagcttgaccttgatggacagaccaataagggtggccatgctgcagtgcggaatggttggtgtgaaagccacagccactgtactctcggggtcgctaacctggttgtggaggagagatgtcaagagtcaaccaccctcagcccaaggtccctcttcttagtttgttgttttgggcaaatcatccaacttctatgggcctcagtttcaacacccataaaataggcacaacaatctccctccccaaagatacccttcggtgttcgtgagcatagagcacgccagctcctgctgcacagaaacctttctgactctctggaacaactcgctcccctcggaagtgactcacctgaacccgcacctgctctactacgttcaactcctctagcgtcagtggatgctccgggtcattgatggagcgaatcagatgtgggaagtgaaggaaaagggactctgcgcccttgcccacttagaaccctctgccaggaacgccctgctgggatgcggctccaccagctgctcgatatcactgctccccccaccgcaagcccccggaacccgcccgcgcccagcagcggcggatatcgaagatctcgcgtgcgtcgatgctgtcgggaacctgctcgtcctcctcgcctgccgtcacaggccgctccccagagcgctggtagatgagggggttggcattctccaggaggccgccgccgaccccgccgccgcctaccatcgcggaaccaccaccgctgatcctagcaggcgtgcgcttccgctccaacccgcgcacttccggagaacgggaagggggcgtggcgtggcgacggagtcgcgcgagggacacgccgcgttgtgggttctcggcctgaggtgcgagagaagcggtgaccgcggccctggctgctcggacccgggaacatgatggtcgctggagcagaaggcgctgagaagggaccacggcggcgctgggtcgtgcgagccagtagcgggctgaaacgtagaggccagaaccaggtctcagggggcactaaaggcggtcggaggtaatccccacaccgcttcctcctggaagtcaggctggccgggagctcccgtatccaggacggttggtcgcctctggcctggcagggatcctagtgtctcgggacctcccggtgacgcgcctgcctcccctgctgcaccataggcccgggagtacggcgtccccacagcttggaccggcaggggctcgtgaaatgtttgtcaagtggataaatgaccatggccgtggtctccgcgggaggtgaggaaactgaaagccaccgaggaaaaggggggcgctccttaagaagtgccgcggtcacgtgtacgtttcaaaagaatggcgtgactgagtagggaggggaccgcggagaccctcagaccctggactgtaaggagatgaggggccgtgaaggggaacccaggaaactgagtcctgaaagcaaggaggaacttccagaatgaagggcgccgacactccttcctgcctttgctcaagcggttccttcaccccgatcaagttccttcccatttctccatctgggggatcctgaacgtgcacatcctcagagaagccctcctggggtctccaattctagtttattgccccctcctatcgatcccccagcgcgctcatcgggcctgtggacaaggacaggtttgaagagaggattccctggatcgcggaagggctgcaggaatggcacagccccttccgaggatgccaaaggagcccgggcaaaggaaagtggccgtgcccgggcctgcctaccactagatccccacccacctatgactgctcagtcccgctctcctaccacacccacctttcccggcccaagccagcgcaccccgctgactccctgcccagtccaaactccaaggctgggcaaggcactgatccactgctggacagacccggggcagcctctgggtgaacagcagcgtgtccgccggcagcgaaccgagaccagcgagccgaccatgcggctgcacagacttcgtgcgcggctgagcgcggtggcctgtgggcttctgctgcttcttgtccggggccagggtgaggctccctcggaggggcgacagggaccgggctcagatctgccaaatgctgcggaggcagaacctgacagtgcgggagggcaggcgcctgggaggtaggagctggtggagatgacagcgtggaactcgtgagccccacgcaacgcctccccgccgcccaaggtgggctcctagaagcacagaaagggtcgggctgggggacaccacggcaaggaaccagcggagtacaggggccccaggagcgccgggacatgccaggccgggtaggcagcctggggtcggagtgggtgagggattggggtgtggggattcagtccatttccctcttatgattgtggctgtagcgggtgctgccggccggtaataacagtaatagcttctggcagcatctggctctcagtgtgtggcgtccttggccaggggggatgccctgagccctccaaaggggcctcagacaaggatagtggtccttggggaacagaagcccccaggcgccaaatcctaaagcagatctaagaggccacagtggctgggtgcgattggctcactcctttaatcccaccactttagaaggccaagggagagtatcgcttgtgcccaggagttggaggccagcctggacaacatagtgagactcggagtgtacaaaaaattgaaagaaattagtgggctgtggtggtctgtgacctgtagtcccagctacttgggaggctgaggtgggagatcactttagtaggggaggttgaggctgcagtgagccttcatcccactactgcactccagcctgggtgaaaaagcaaaaatctgtctccagaaacaagaaccaaagagctcgtggtgtccctcatgccatttacctcatcctgggcaagggcacaacttggcttccagggcaaaggtgaaggctctgtgtgcctgccaggcttctccaggcccttatcagaagctgggggagtgtttcggcctttggtcctctcacccgaaactctcctaagtgtatgatctgtctcttccaacccttccccaatttaatttgcgcaggtggagtccatactccccccgccccatggtgcactgctgcagggcttcctcccgtgcctgcccttgaccacattctagagttcaccaggagcccagcaggaagatctgcctggcctcacagatggctaccttttaaaatattttgggccaggcacagtggctcacacctgttatcccagcactttgagaggcagagatgggaggatcacttgaggctaggagttagagaccagcttgggcaacaagacttgtctctaccaaaaaaaaaaaaaaaaaaagtcaagcatggtggcagacagctgtactccaagctactcaggaggctgtggcgggaggatctcaagcccaggaggtggaggctgcagtgagctgttatcatattactgcattccagcctgggcaacagatggcgaccttgtctgacaaatatatatgtatacaaaattttgggttggacccacattcagaaaaaataattgacaagccataggagggtacaggtgatgtgtgccatcctctttttacccaaccagtcctggcttctcctcaggggccatcaaagtccccatggcccacactggaaactgcttgttgacaccgcagtacacacagtgcccagcagtttacacaagaatagatgtgtgcacttgtccttgattttcatctaaacagtcataaactcacccactttctggagccaggcttttctacagctgggactacaggcatgcaccaccacaccccgccaatttatttcctgatttttttgcagagacagagtcccactatggtccccaggccagtcactgtgctttttatatcccagccacagccatacttttctcttgcacctcttttcaccaacatcactcatggtttggatgatgctttctttacatgatttcttgccactttggacatgacatccctgaggacaagaaacttgcctgcccaattcccaccatcatcctactgtcacatgacctggcacacagttgaaggacactctagtcccatcaagggcatgtgaccctttgtttgaaggtcctagggctgaatgatgatgcctggccccaaggagcctcagcctggtgggatggagacaggcccaggaagccagagcgggaagggagtgttacaggcaggaagtttgtaaagcccatgtttacagatcagagtcccttgagctaagatgaggatggcaaggaagcagcaataccaacagttgggagggcagtcgattggtcaaacccaaccgtgatgtctgtctctctgcccacaggccaggactcagccagtcccatccggaccacacacacggggcaggtgctggggagtcttgtccatgtgaagggcgccaatgccggggtccaaaccttcctgggaattccatttgccaagccacctctaggtccgctgcgatttgcaccccctgagccccctgaatcttggagtggtgtgagggatggaaccacccatccggccatgtaagctctccaaggggtccagggaactccaggccctggggcaggggtgggggtgctctgagctcagctaggctgcagttatcatttcatctaaacccccacagccagttttccttctgagtttcgtggattcccacgtgcatttttccaatgagcatgctgaggctcaggagggcagaataacttctcagactcctggatcagggcttggcattcagaagacattggctccaggtgccgaagggaggggcagacacacgtatctccccagattctggttatgccaagctttctctgccaccagtggcaggtgtctctgggaaaggttcgggttggctctatgaaccttgtaggagcccctaactctagtggcagatgttgcaaatacctgaagagaacagtagtggtagctttctggggacctgcactctccacaggcactgtgtccactgacaggaccaggagccattggccaagagacatgtatatgtatatgtatatgtttccaactggaggccatgtaggaatgatgagtttttgagagtttagacttgggatgagagacatcccactgcccttctcatgagaaattaacatccattcactcatgtagcacacatatgtgggctactcccctgtcccaggccttacgggttacaggaatatagtggtgaatgtcaacacatgcagccaatggttctcatagaaacccctaagagtcaaggtttccggcagtgcgaggaatgatacccaaggtcctcagtaacctcgaggcctccctggaagtccaagctgcatcccagcttccccagagcctgtggcctgtaacttggtgggaagggatttttgagagggatcatgtgtgagcaggatattgtgggaagggtctgagggtggctgggagcacctctgaacccagggtctggttttggccacagcctggcccctggactgattatttgccctggttaccaggtgtctacaggacctcaccgcagtggagtcagagtttcttagccagttcaacatgaccttcccttccgactccatgtctgaggactgcctgtacctcagcatctacacgccggcccatagccatgaaggctctaacctgccggtgggtgtcaggccacagttcactgggggttggaggacagttcttctgcaagaagctgaaaaggacaatattagctcaggccctgcttcagagtggaccatgctgagaagcttctcactgtcaggtccaagaaatgctccttacccagactgggcagctggcccctggacatggggtcacagagttctggctgctcccagaggtcaaaggctgtggctctgggctggacccaggactcactcagccaactcatgccaggagatccacttaagtgccaaagggctgcaccttgaggtgaccaagaaccccagccatggataatctgttgggcctatagaatgggcacacacaaaaactttttttcttagagatggcatcatgctctgttgcccaggctaaaatgcagtggcatgaacatacctctctgtaacctcgaaatccgggatgatcctctcagattagcctcccgagtagctgggactactggcctattccaccatgcctggctcatttttaaaacattttctgttgaaacggggtctcactatgtggttcaggctaaggacatttttggttaatgttcatgtggagccatcagggagacaccccttttctttccactttggtgaattatctggggttaatgaacccaggctttgatacagggggttcgattgcaaagattgggaggcctggtcttcctgatagatcttgggtgcctaaccatttgcccatgtaatgaatttgtgctggagatctaatggggaggtagacagaggcaaagcactggttggtctaggtagtggccctggtggggtttgggctgggtgggagcatcatggtagctgccttgatttccccaggtgatggtgtggatccacggtggtgcgcttgtttttggcatggcttccttgtatgatggttccatgctggctgccttggagaacgtggtggtggtcatcatccagtaccgcctgggtgtcctgggcttcttcaggtgagactagggctgggctgggcaacccgggctgagcggggccaggacagccctgtgatccctgtccctgctacttctcagcactggagacaagcacgcaaccggcaactggggctacctggaccaagtggctgcactacgctgggtccagcagaatatcgcccactttggaggcaaccctgaccgtgtcaccatttttggcgagtctgcgggtggcacgagtgtgtcttcgcttgttgtgtcccccatatcccaaggactcttccacggagccatcatggagagtggcgtggccctcctgcccggcctcattgccagctcagctgatgtcatctccacggtgagtgccctcagctgaagaggcctaggcctgctccctcccctcatatccctcagagcctctgtctgttaaacggggatgacaagggccatcgggagcatgctccaggagctgctgcctaccgtggaattgctggggggctccagggtcagaattcacatccttctgccattgcagaggccgagcttgttctgtggctcctgtgcaaagttgtcaccctagggatccccaccatgaggagaatcatctaggcggatgggatggcccctgtgtctgggacttctgagttggaacagtgtcagaactgcaggaactcatacgaagtaccctctgagatttggggtacccctgttcttggccagggccttgggcaaactcctctcctctacctggaaggatgagccagcccctgcctggtccctttacaggtggtggccaacctgtctgcctgtgaccaagttgactctgaggccctggtgggctgcctgcggggcaagagtaaagaggagattcttgcaattaacaaggttggtctaaatggatgtgggtgtagaggaaggggtgcaataggcatggggctggcaggcctgcacggccgtcatattccctgggcacattacctcatctgcatgcctgagtgtcatagccctgggtcgggactgaaggtcggtgcatgctgagccaaacagtaatctcctggggtgggtatgagcatccagggataaactgggaaggagtggaaggtactcagagggcatcggaagatgtctgggacctgaccttgttccctgaccttacatttcccctcagcctttcaagatgatccccggagtggtggatggggtcttcctgcccaggcacccccaggagctgctggcctctgccgactttcagcctgtccctagcattgttggtgtcaacaacaatgaattcggctggctcatccccaaggtgagccccaacccaagcccacaagtgcctggggagcccatctggtagtggggggtgttcagggcttcatagctccaggctcatcccatccccagctacagactctctcctggccatccaggtcatgaggatctatgatacccagaaggaaatggacagagaggcctcccaggctgctctgcagaaaatgttaacgctgctggtaaggctcctggggtccctcgccaatggagacgggctcctctcctgtcctgagacagaggaaattcaacccccagatacccttcctatgtagtgacccccatgagcaaaggcctgggtgtgtgtgtttaggggtggggtcacctcagagcctcgcctttgctcccccttcctgtgccatccccaagcccgagaccacctcctccctgcccctggcatccagtctaacctgcctcttcctgatccacctggggtagatgttgcctcctacatttggtgacctgctgagggaggagtacattggggacaatggggatccccagaccctccaagcgcagttccaggagatgatggcggactccatgtttgtgatccctgcactccaagtagcacattttcagtgtgagtatatttggaccaaagcctggcgggcagggtacagctcagggctgtgggtcccaggtgagacctgctgctgtccgggtcagcactcatgtttattgggctccggggacacttgacatccatcattgcagtaaatcctcatggctagcccaagaatccgacatttcccccatttcacagacgagcaaattgaagttagggaccttcagtgacttgcccaagatgacacagcaaagaatcgcaagtcctttcctctattcctgccccagcctggggctccacaccccattgtccagattccagccagctttggacctaggtatcttatcaccatgggtgaggcaagaagtcttcagggggaggggccaccgtgtcatgggctgtccaccccacaggttcccgggcccctgtgtacttctacgagttccagcatcagcccagctggctcaagaacatcaggccaccgcacatgaaggcagaccatggtgatgagcttccttttgttttcagaagtttctttgggggcaactacagtgagtcttcttcctttcccgggaggtgggctgggattctggctgggtctctgagcgatgattgattgtcctcactgcccagataaggaaactgaggctcagagagaggatgagatcaggtgtccaaggttttatagctccaaaagctgcaccaggattagaattcacgactcttcagactgtgagctgtgctccctctgcctctccccagccatgggtgtctggcctggtgcagaacaggtgtttcagggacatgtttatttcttcagtgactcccagagatagaaggaagaaggggcctttggggccatgaaggagcccaggatggagtcagccagagcctggtctacagggaaagtttggaaaaggggagggctggcttctgagggcagtggaagaaaaagcggagaagcaggactggggaccgaggtctcgggggccaaggacgagctccacctgggatgctgaggttggacatcctgatgaagacacatgtcctcttcctcttggcagttaaattcactgaggaagaggagcagctaagcaggaagatgatgaagtactgggccaactttgcgagaaatgggtgagacagcacacccctgcctcaacctccccgattgggggacttgtgcccatccagtgctctcctagtctggggtgacctcatgagcacacccgcatccttcatcacatgatggccccttccccagctccgggacccactcagacagggtgggggtgcgtggggcagtggacacgctctatctctccagtctacctggagggtgggcgccagtgctgtgccaccgtcagggcctccctctcagagagagggacacaacagagctggctgccctcccccaacccccactggtgctgacactagccagagggagcttatttcctgtttctggaagcctccccactcattccccaagcccacctggcctgcttggctgccttgcctgaccagactcagggtgctcaggtctgggcttcgggggcccagagtgaccctcatactgccctgctgggatggcatgtctacaggaaccccaatggcgagggtctgccacactggccgctgttcgaccaggaggagcaatacctgcagctgaacctacagcctgcggtgggccgggctctgaaggcccacaggctccagttctggaagaaggcgctgccccaaaagatccaggagctcgaggagcctgaagagagacacacagagctgtagctccctgtgccggggaggagggggtgggttcgctgacaggcgagggtcagcctgctgtgcccacacacacccactaaggagaaagaagttgattccttcattcacttcgccattcattcatacttccgtccatccattcagaaagcatttattaagaatttactcaggcatgatggcccatacttgtaatcccagctattgggaaggatgagatgggaggatggcttgaggccagaggtttgagaccgaccagccagggcaacacagtgagaccccttctcaaaaaaaaaaaaaaaaaagagagagtgtgtgattagaagctaaataggaaagttttgagcttcaagtcagtgaggagtaaaaaagatttttaaaaagcaaagaaaacaaaatataagggaaaaatatgagaaaaataaaaataaaaagagaataataggccaggcactgtggctcatgcccctaatcccagcacttttgggaggtcaaggtgagcagaacacctgaggacaggagtttgagaccagcctgcccaacgtggtgaaaccccatctctatgaaaaatacaaaaatcagacgggcacagtggtggtgcccacctgtgatcccagctactcaggaggctgaggcaggagaattacttgaacctgggaggcagaggttgcagtgagctgagattgtgccactgtactccagcctgggcaacaagagcgagactccgtttccaaaaaaataagagagaatagaagaagctactgcatgatgttagttaccaagcctgccatgggtcctctcttgctagacacactccatagatccccccactgagctgtggatgggcaaaccccggtggaatcccaccctccccaacaccccactgagccctgggccccctcctcccttcctcacctccaccttctccctgccttctctcttctctcgtctgagcccccaggccttttccactttgagggaggtgcttcgaagaatgttgcccacacctaagtgttagaagcctatgtccgttcatccctgagaggtctgaaagaataaaaataaattctaaaaaaa

SEQ ID NO: 124 - DNA, 15475 bp, Homo sapiens
cataagcaagcaccaccatgcctggctaaattttttatttttattttttattgagactggggggtggtcttgaactcctggtctcaagcaatcttcctgccttggcctcccaaaatgctaggattacaggcataagccaccatgcccagctaaagcccttactctttttttttttatttaaatctttttttacagagacagagtcttactatgttacccaggctggtcttgaactcctggactcaagctgtcctcccgcctcagcctcccaaagtgctgggattacaggcgtgagccaccatgcctaactaagctctcattcttaatcactgtactgtttattaggtatattgtggtcttaggatattatatgatctctccgtttaatttcttcatttgtaagggtataaaaatatttacattgagggttttaaaaatgagattaagtgaaataatgtacttattttttcaacaaatgtttactgatctcctactgtgctgggatgaataccaggcattgttccaggtcccggcaaagcaagacagcacagtccataccccaacagaacttagaatcagaggtggcgaggccagacagtaaagggcacaccaggcaatttcaggacatctaagcactggagaggagacaacacctttagacacagtggtctgggaaggcttactggaggaggtgacccctggcctgaagcccttcccatgaaagagagtgaaccatgcaaagacaggggaggagtggtccagcctgcccagagtgagtgctgaacctcgctttcaccagcaaagcaaaggagattggggtacttccttgtgtggagattgtttttagaagacagcacactctgtcagctagactagatcttactgtgacaaaagacaggccaggccagccagtttttcacagtctattccagcttgcacatttataacccttcttcacagggcactgcaagcatgggtttctgagaaccaatctttataaaagtgccttgaattccttggtaattatttccttttaagcgtgtaactcttattattgctaaactgctttttaagttaatggtagttgttgtccaaaggaagtctgatctgtgtttttgaaacctcaatgatcgtctgtttctaattaaggaattggatgaagacatgcatcagaaaattgcaagggagatgaacctctctgaaactgcttttatccgaaaactgcacccgacagacaactttgcacaaagtaaatatgcattttttttttttaagaactgttctgtcgcacgggctggagtgcagtggcatgatcttgactcactgcaacctccgcctcctgcgttcaagcaattattgtgcctcagcctcccgaagtgctggcattataggtgtgagccaccacacctggcctaaatatgcactttaaaataattcttgaatgacatcagaaattattttttaggtgggggaatgatctttaaggaaaatgcccccttattatttgcatgcagatagtagatagagcgggagattctgatttggtttcggttcatttggggaagggggttttggtgaatctgaatgtttccattccagatctagcactggggagccctaggatgcttgcctagccatcattcctccttttacaacatgttttggctactcatcatgctagagaactatataggaaagaagaaaatgagaaatctgtgacctgcttgcatgggaatgatctcatctctctttggcttttcctatcctcaggttcctgctttggactgagatggtttacaccagcgagtgaggtcccactctgtggccatgccaccctggcttctgcagctgtgctgtttcacaaaataagtaatgtgattttctttaatgaatctaacacttagcaaatggcttttttttttttaagttctcacacacactttttctgatggtccaaagtgactggtataaagactctgcagagtttacttcatgctattcataatgcagaaacaaaaccagcgaccttcaatagcactttggcctttctgagtatgtgcccagcatcattggaaagctgcgatcagaatgctattttattttatttttattttattttactttctggtctacaaagaatttgacaaccattttattttattttattattttttgagacagagtctcactgtgttgcccaggctggagagcaatggcacgatcttgactcactgcaacctccgcctctctccacctcctgggttcaagcgattctcctgccttagcctcctgagtagcaggattacaggcgcccaccaccacacccagctaatttttgtatttttagtagagatggggttttaccatgttggccaggctggtgtcaaactcctggcctccagtgatccatctgcatcggcctcccaaagtgctgggattataggcgtgaggcaccatgcttggcctcattttaaactggagatctctggtctttgtgaagcttgcatgggcagaattgtcatctcatacgatatgagattggagatcaacaggaacatttcactccaattatttccgctcccacattgaaattcatttcacaataagagattcttcaataaacattttttttttttttttctgagatggggcctggctcggttgaccagactggagtgcagaggcaggatatcagttcactgcaacctctgactcctgggctcaagccatcctcccacttcaacctccaaagtagctgagaccccaggtgcacaccaccacacctggctaatttttgtatttttgttagagacagggttttgctatgttgcccaggctggtctcaaattcctgagctcaagtggtctgcccaccttggcctcccaaagtgctgggattacaggcatgagccaccacgcccggccaataagagcttctttgctctaaatttgaagattcctgggcccccactgtatacattcaccttaaaaggagttgcagcaccttaattctgccagtttctatcttagctgcatttagtttaatggacaaagatcagggccttgtggggatgggacagagaagagattcctgggaaatgccctaaaacaggagatggaagcagccacaaacaagcatagacagcaaacggaaatggaaacaaggaaagaaacaggatgataggacagaatgtcactgtgggggatgggcaaaaccccgtctctactaaaaatacaaaaattagctgagcatggtggcgggcgccggtagtcccagctactcaggaggctaaggcaggagaatcgcttgaacctgggaggccgtggttgcagtgagccgagattgtgccattgcactccagcctgggcgacagagcgagactccacctcgaggaaaagaagaaaaagaaagtaggattgaatagagggagaaattgaactgcagagtagtagcaacaaggaaaggcctaggccaaatccgtggggagctctaaagctggacattttttcaagtagtatagttccaagtagaggcaaagattcaggcctttttaccctccatggaccagttcccaaagcctggaaaagatgtatgactttgggcaaggtagctctactcagccaaaggtaactccaagagagtgactcagttgagagctgttggccactagcactctgggcaagcagggtcagggccaggtgtaggcagagccagcaaggccccaggttgcagctgagagcaggtgtctccttacattttgtaccctatggtacttccttgcctcatggagtcccagtcctgaggccatgggtcagacatagaatatggatcagcacccaccagagaaggggaactttgggcgaaaggataagatgaagcatctgtgggatgagctagagcgagaggaggagcatcccaggcagaggctaacaagtgcaaagtccctggggcctgtctatatgattggcaggagataaagttgagaagccatataatgtaattcaatatacattttaaaaagatgattttggtatctgtggataggggacatgtgcaaaaggcaagcaaacattccgaaatgtttaggaattgagtcttgaaaaatagggtttactgaaattaaattgagtgtcttttgtttttttgtttttgtttttttgagatggagttttgctcttgtcacccaggctggagtgcaatggcaagatcttggctcactgcaacctctgcctcctgtgtttaagtgattttcctgcctcagcctcccaagtagctgggattacaggtgcctgccaccacgcctggctaatttttgtatttttagtagagatggggttttaccatgttggccaagctggtctcaaactcctgacttcgggtgaaccacccgcctcggcctcccaaagcaagattgagtgtcttttgaaaactggactccacgtgggttggtttgatgctgaggtttggaataataacatcctggaaacccccatagggcagtcttcaggttagataagataaggtatgaaaaaatgctttgtaaataatgtcttatgcaaatcgtaatgagaaaaattaagctttgtgtttctgaatgtcaattttatgctcaataaaagttaacaagccaaagttcttcacctttgacatgtggtttaagttttacagaaatattaagggagagaaaagaattgggtcagcattctttgttttcactaaaaatgttatacacactgataagtagcccaagttgtatcagtaacatgggatgccaacatttgtggtgcattctttaaattacattgttatgtaaaaagtttggttcatttaggataaaccaaatttatttcatataacactgatatttacaacttaaatgttttgttattcccttggcgtatcttagactagaagaggttatgactctatggttgttgctgctggatattttaaaatctgtattagaaacattacaggctgggtgcagtggttcatgcctgtaatcccaacactttgggagccaaggcgggaggattgcttcagtctagaacttagagaccagcctgagcaacatagtgagaccctgtctttacaaaatatttaaaaattatccaggcattatggctcatgcctgtagtcccagctactggggaggctgaggtgggaggattgcttgagctcaggaggtcaaggctgcagtgagccagtccccagcctggtcaacagagtgagacagttcctcaaagaaagagaaaacattataaatggtaggtttaatgtattaacctcattttatagatgaggaaactgagatttaaggaggctggccaggtgtggtggctcacgcctgtaatcccagcattttgggaggccgaggtgggtgtatcacttgaggtcaggagtttgagaccagcctgaccaacatgataaaacctcgtctctactaaaaatacaaaaattagctggatgtgatggtgcacacctgtaattccagcttcttgggaggctgaggtgggagaatcacttgaatgtgggaggcagagggtacagtgagctgagatcgtgccactgcactccagcctgggcaacacagtgagaccatgtctcaagaaaaaaaaaaaaggaggctaagttagtaagggcacagtaagcagtaaagagctgggatctgaagccttgaagtatgacgccacatctgatcagttatgttcttggttctcaagttagaatctagtgagagttttctccattctagacctcagcaacccaaacctcgctccatcatagaaaaggatgacagtgccagaaaatctaagacaatgcaaaggtgtttgaaatggacatgcgcatatatgacaaagtttatttcctatttcttgattcctattttggccagaaaacatgaatagcacgctcacgtttgtcactctgagtggagaactaagggccagacgagcagaggatggcatcgtcctggacttgcctctttatccagcccacccccaggtcagctctttgtaattattgccctaagccatctacaaccgacagctctcctgttttataataattttgttttttttccccccatctaggacttccatgaagtagaggacttgataaaggttggtaaaaagaatcaaacctgagcctagttatttgttattgtttgcacacaaagatttggtatcatttgatccacaaagataggcattttaccaatataaatgttacagtgtttcaggtttgaattttaatattcagtctatttggtgagaaggttgaccagttttccttggctcctgattgtcactgctggcccccatggtaggatggagggaagagacactgttatatgacaggctgaaaggcacaaaagaaccaatggaggtggtaaagaagagggagaataggatgtcttaaggaaatgtaagtttctgggaggagaccagcctttagggaaattaagggatgttgaatttctgtgcttctctagctagaaggagaggaatgggccccgagcatggctgtgcaagttcaggtgtgaaagttgggaatttctggcagaaagaggtcattccataaaatccatacacacaagatggagggaaaaaatggaaccttcctggcagctgtcagtgtccccagtttctgtagtaaaggatgggactgaggtgggggagggctgtgctttgatagaggaaaccaagaaagcatgagtaccttgcagataagacaagatacagaacatgggctcctcatggggtctgtgtgggcatggggcttaataatattaatgatgatgaaacattttgagagtctctctgtgtgcagtgccacatgctgagcatttcacttgcattgtccatttaattctcaatgtttctcagtaaggtaggcactgcagttgtcccatgaaggttctgcagggccagagcagccctggatgaccaggggcttggtgtgtagagaagagagggcccaggtcaggaccagggcaagggctgtcatgagaaaaatgattctgtagcttagtctattgtgagtactacttgggtatttctcagtgaatttttaactacagcatttgtagtctctagtatttggctttatctgtgttttcaaagaatataaacaaataagcatgatggattctgattttatactcaaccccatccatggcttgggttttggagacaagccaaatttaaaaacaaactgctttaaacatactggtaagaaagtggaaaaaacttataatggtagaccttgttcatggtagaaagaactcaacttagtctcagggtcagcatttattaaatgggataacaaagggttgtaagtattgccattttgtgttcttccctagaaactggcagtaagattcccagccaagaattaaacctttttttttatttgagacggagtttgctcttgttgcccaggttggagtgcaatggtgtgatcttggctcaccacaaccttcacctcctgggttctagcaattctcctgcctcagcctcgcaagtagctgagattacaggcatgcgccaccatgcctggctaattttgtatttttagtggagacggggtgtctccatgttggtcaggctggtctcgaactcctgagctcaggtgatccgcctgcctcggcctcccaaagagctgggattacaggtgtgagccaccgcgcccacccctgaacttttaaatcaatgtacaaactcatgcagataagggctgggttcgagagactaaggctctggagaacagatgggatccggctgtaggagttcccatttcttgaggaagttacattggtcagcccatagtcacagaggcagaaagcccaagtaccacccaaggcagaaggaattctggatgtgggaactggagtatcttggcctctaacaaggattagagaacctgaagccacctagtgactgccatacaattaccatgtaattaccatctgctgggcctggcagctggggctggtgccaaaggatgacttggtggtgtgggaaggggttgtctcctcataatccccctctgccccaagccaccctcaaacaaacatacaaacaaatgatgttcctggatttcagcaagattatgtgcagtcaggtagagtgaaccagggtatcttgagaacatgttatgttattgatctgtcacatacaatctgagtgaaagtggtgtgcttgccaagcagagcagcacaggacgagccctctagtccctccttccaatcaagctgctagccctgagtgcttgccgtgtggaacgttctaattgctgctgcagatactccacatatacgattttatttaatcctcacagctctaagaggtggacatgaggcccctccatctctaaagatgatggacagtagggatttagagctttttctctgaccttctcagacctgggtcaagatatgtgtgtgtgtgtgtgtgtgtgtgtgtgtgatctttggcctttctaagtctctttctccttctctgtggggagaatacctacttgaaggagttgtgcattgaggcacatagtaggcacttgtgagaatgcctatgttttttttcttttttgagacagagtctcattctgtctctcaggctggagtgcagtggtgcgatctcggccaagtgattcttggctcacaagtgattcttggttcaccaggttcaagtgattctcttgcctcagcctcccgagtagctgagattacaggagtgcaccaccatgcccgactaatttttgtattttagtagagatggggttttgccatgctggccagcctggtctcgagctcctgacctcaggtgatccacctacctcagcctcccaaagtgctgggattacaggtgtgagccactgcacctggccacaatgcctgttttgaggctcacagaggcctctttggtagccaggagactgaccatccttgggcaacaccttaagctctgaaactgcactaacactcttggggactggagacgatgggcatgcttggctcacagtggatgctcaatgagaggtcatttcccatttcaggggatcaaggacttggcccagggcatgtccctgaggagtttttggtctgtctccacagactgccataggcaacacactggtccaggacatctgttattctccagatacccaaaagctcctcgtccgcctcagtgacgtttacaacaggtaagatttttggctgcatcagcactttggggagggctgagtacccagatttatagctcttccttagtctggctgtgctgtgtccagtcaaaccatgatttacgcagccagagtgtttctttccctgataggaagacattcccacttgttcttccttcccctcctgttaagctctttgagcaagctgcaccctggcctgcttcacagagtctgtgtggtgagtgggctgtgaaatgggtttgtcctaatccatcttgtttatgaacaaggtcgtttctggagaacctgaaagtgaacacggagaatctgctgcaagttgaaaacacagggaaggtgaaagggcttattcttacccttaaaggagagcctggtgggcagacccaagcatttgacttttactcaagatattttgcaccgtgggttggtgtggctgaagacccagtgacaggtactttttacttgagcccaggggagggttaaacaatggaagaggaggatcacaaatagttatttaagtgcacttcctgtgacctttcaggtggcttgagttttgagctgccttgttcctctatctttccccatccctgccatcccttcactgaagtcttccatgaaaaacataaaatagagcaggtggataacagggttaaacctgagtgtcagacagcctgggtttacattcctagcttcctagcttttgaccttgggcaagtgacttgacttttaaaagtctcagttccctcctctataaattgtatataatacctcatagggctataaaagcacaatgcatgttaagggcttaatacagtgcctggcacctagtaagtgcccaataactactagctattatattgtattattatatctttttgagacatagtctcacttcatcacccaggctagaacggagtggcatgatcccggctcactgcaacctcagcctcccaggttcaagtgattctcctgccttggcctccccagtagctggaactacaggcgtctgccactacacccggctaatttttgtatttttactagagataggatttcatcatgttggccaggatggtcccaaactcctgacctcaaatgatccctcctcggcctcccaaagtgctgggattacaggcatgagccactgcgcctagctaactactagctattttaataataacaacaaaactagctccttgagccaacacttctagattgtccaccacctgggagcagagggatgagtcaaaggtgggcagaaatgtcatgactcctactctccctctctttgggaacagtgggctgcactgcaaaggacgagaatgcttgatgtgggaggatggtgggtgggatggtgaaggggccacaggaggctgggcagacccttcagggctcctgttctggtcagatggcagggcctggatggctcagttactctctgagtaacaaaacacgtgaaattcaaaactcagcaaacaagcacttttaagactcaggaaaatgcccaaccatatccagagtgcagcttccccatggaagaaaagttccaagcagattgcacaagcacagctgcttcacaaagattttaattggcacagagtgcaagtttgtttgtttgtttgtttgtttgtttttccccgtaatgcttttctagagtataaaggcctttggactttgataaccaacatctgagtttgcttgggactgaagggtttctcagggctcagaactttcagtgctaaaaccagaacagtctcaggcaaaccaggcaggatggttggttgccttacttgaacatcccataacacttttttttttttttttttgcccaggctggagtgcaatggcacgttctcagctccctgcaacctctatctcccaagttcaagagattctcctgcctcagccttccgagtagctgggattacaggcaactgccaccatgccaggctaattttttgtattttaagtagagacagggttttgccatgttggccaggctggtcttgaactcctagcctcaggtgatccacctgcctcggcctcccaaagtgctgggacgcccaccccataacacttcataggttttcccaaacgagaggcttttcctccccatctttttcttcgcaaaatatttttctgtcagttattgctgtatattttgttatttcattttaaaatccaatctctgatctaaatctagagtacaaacgtgaaaaaatacctcactaaaaaagaagttcttttggtgccaaaagctcaggaatgttagcttggtggaagagtttgccttttggccaggtgcagtggctcatgcctataatcccagcactttgggagaccgaggtgggagggttgcatgaggccaggagtttcagaccagcctaagcaacatagggagaccacgtctctacagaaaaatttaaaaataatagttaaaagaaaagaaaatttagccttttttcagagtttccacctttctttgcatatgcactctgggaagaaggagatactttccctggaaagatgtagaaagacttatgcaaggctgggcgcagtggctcatgcctgtaatcccagccctttgagaggctgaaatgggtgcatcacttgaagtcaggagttcaagaccagcctggccaacatagtaaaaccctgtctacactaaaaatacaaaaattagctgggcctggtggctcatgcctgtaatcccagctactcaggaggctgagacaggagaatcactttaacccgggaggcagaggttgtagtgagccgagattgtgccactgcactccagcctgggcgacagagcgagactccgtctcaaaaaaaaaaaaaaaaaaaagaattattcaaaggccttgattctcctaccaagggctaagaatgagctggtagacaagacaagaattaaaacctgcagtctaattcagccttaggagactgtaaggaccagtcaccgtggctcatacctgtaatcccagcactttgggaggctgaggcaggtggatctcttgagatcaggagttcgagaccaggctgggcaacatggtgaaaccccatctctacaaaaaatacaaaaattagccaggcatggtgacatgcacctgtagttccagctacttgcggggggctgaggtaggaggatggcttgagaacgggatgtcaagactgcagtgagccatgattgtgtcactgcactcccagctggacaacagagcaagactgtgtctcaaaaaaataaaaataaaaataaaataaaataaaaagaaaaaaggaaagaaaagaaagtgtaagacatatttgatacataatttggccgagtttatccataaattctatgtcttcctttttatctcctttcataattctacaccctgctgtggcctggccaacataatgatttaggtgatctagagtttattcaaactggataattgattgtaattgcttagaaatttaccacaaaatcgcctctgttttcttggggattgtctcctaacttttcacttcttttgagggtctgcacacgctgttctcagcagctactggtcccagcatctggggaagaaagaaatgcatggtaggacagctctttaccaatttcttttttatttgcctaattcgaagctagtgttccttctcatatgtactatccccttgaaaatgtaatacaatgtcatgtatcacccatgtgaaaatgaaaggttttaaaattccttcacccttaaagatcctccaccccaaacagccttcacctctgcctcccccaacatacagagactgtacagacacagatacagtaactgcccaataagtgtttgttgaataaaatagctgtataactttggcccagagaggttatttataatgtgatgggttgagactggatgatgaccaaggttccttactgctattgctagtcacaggattgaatcaaacaaattactttggaaccaagtcccctagtgattaatgtattgcttagaggcagagaaaaatgatggcagccaatggaggctgcactgccctgatcatccaaggaggagtctgtgaccctgatttggagagagcaaggtggctattcattttccttggcgagtctaattattctcctaagtactgagctcctggaaggctgaggctatgcctcttttgtctgcctggaacacgtggttgcttgaatatgttatgagtgaatgaactccctctgtcctattcagagctgagaagatgggggccttctcaagagggctgagaccacccttcttcatcttcctagagttataggcctgcctctattgtttcaaacatctttgcttactcctagagagagcaggggaagaagcgatgagtggggtgtgtctgggccattacaggaattagtgaaggagatggcccaggaaaaggctcaggaagggagtatgtggagctgtgtgttctgtagatcaaattgagtttgtggctttctcagtctgcaggagaatggggatgggagtgggcagtaccataaacagacgaaggaatttattcttgaaactgatctgggaggactctaagatttgtaataagtctttcactatgctttgttaatttaaaagggtgaaaatactcttaatttgacctgtttgttttctttagcttttcagtgttcccaccgaggaggagagctgggaatttcccttcgtccagacggaagggttgacattagaggaggtgcagctgttgttttagagggcacactgacagcctagaggtggttatgctgtgacgctgctgtctctaaccaccaagtattttctgcttaaaaagaaatgtaaggggctgcctttagcaaatgtgcgtagtagtctacttaatcctcatgttaaaaatcgaaaaatgggccaggcgcagtggctcatgcctgtaatcgtagcactttgagaggccaaggtgggtggatcacctgaggtcaggggttcgacaccagcctggccaacatggtgaaacctcgtctctactacaaatacaaaaattagctgggtgtggtgccacatgcctgtaattccagctacttgggaggctgaggcatggagaatcgcttgaacccaggaggcagaagttgcagtgagcagagatcacaccactgcactccagcctgggcaacagagtaagactccatccacacacacacacacacacacaaaattgaaaagtgaagacattttaatggagatttaatagtgcttccagactaatgaactaatggagttttggctccactcatgagtgtatttgaaatgtaagtaaccagctacaaagaataatgtcacttcatttgattatgactaccaatcaagagaaggaggaatacatttctgaggagtgatactaaaccatttgagcttaaatgagtacctgattttgcagccattaaaatgagtcaataactatgtggaaatatagaaaaatattttataatataatactaagaaagaggacagtaggccataaagtgttagcagtgttatgctatgtctatataaataagcatgggccattaaaaatagcaaactgaaaacagttcatgtgtggggggcaagtttagaagtaattttaatgtatctaagaagtgatttcctttattgttgtactcaggtacgaagactaaaaatcaggatgaatccagaaaattaacacaaaaaagtatgtattaggctacttcctgtcatagtgaaattaaacactcaaagtaatgtaatctcagctgggcgtggcggctcatgcctgtaatcccagcactttggcaggacaaggcaggaggatcacttgaacctaggagttcgagaccagcctgggcaacacagcgagaacttgtctctattaaaaaaaaaaaaaggaatgtaatttcaatctttttcttgatatatggcttgagaatgataatgtaaaaggaattcttctcttacttcaataaaatgggttttaacataactttaaattcagttaaatatacaatattgaatacctatagttgactttgggatggggactttttcaagtcattaagagtgtttgtttaaggtgatctcattgatggtagttctcagccgtctcaaaaactgcaagctaatcagtcagacattctttaatgaccccaattttttcactttaattgttaccatgttttctatttttactgatttttgctaaagcatgtaagagtgaatttattatagcagtaatcttgtgtttctcctgatgtgcaataaatcaataattcaccagc

SEQ ID NO: 125 - DNA, 2713 bp, Homo sapiens
aaagggaagcttcatcattgctttgggacgctgaccggattcagacccagcagtgtcacttcgcagccctctgaccctgggctggtggcttgaactccttttattgttgttgttcagattagaatatgggttcatgaatagaagtatgtccctttagggttgctgtgagggttcaacgatgcaaagtgactaaaaagggcctaacacggattaatgttatgtagagtaataggaatatggaaggaaaaataaccctgtttcttgcattttaatttaatccggaatccgcatatcacctaaaatgatcccttttctgggagcattccacattttccaaactgtcatcctgtggtggggtgcccggctaggctatggggagacctggagagttttatgcaaaggaggacctgggcaaatgtgcccattcagcctctcaagagtggagaatgcaaggacgggggcagagccctgtgtctgttctgtccctagacataagagaaacgtggccaacagaccgaggtggggacggggacagggaccggcaatgcaggaaatccgagtgtcacatcctctgcctctcatttgcacactgctccctcgctatgctcaccgctcccgccgatccagggacgtgatccagggactctgggaaatgcaaagctacacacagtggagcgggggctgggggtgtgtagaccgccgggattccgagtttcccggcacgcctaggagagggagaggcaggcaatgtcagggaaattgggcaggcaagacgccagggacgccacgtactgccaggttctcaacgaggtggagccaaaggggcaggccccgcggtgcgcccggcgctgggctcacgggttgctgcacccggcccaggatcgcgggcggtgcagactcagcaggggcgggtgcaaggacgaggcggggcctctgcgcccggccctcttcccggactataaagagagccgccggcttctgggctccaccacgcttttcatctgtcccgctgcgtgttttcctcttgatcgggaactcctgcttctccttgcctcgaaatggaccccaactgctcctgctcgcctggtaagggacacctagctccgcgccttgggatgcccgtttcccagccacagtacagactcttcctgggtttgaagaagtcgcatttaaagttctgagctgaaggggctcctttatttcgttaggtgctttcttcccgatcacgtccctgagaccacttctcgcctccctgtgcctctaagttagagttgagggtactgaggcccaaggctgtcctgctccatgtcacccagttggtcagggggctgctggctgagccccaatgctctgaccaggctctgagcagtcagggtggatgggaagtggggggccattgcctcttcggagttcaggacagaaggttctggcctcctgtcttagccttcctgggctgtgtctggagcctgggaccttgcttgtggggtaaaagcaacagaacacttgcccttcccaaaatgaagggagaggagatggggcttctcttcctctcccctgagtgggaaaggagctctgggggctggtccttcagcacagaggaggggtcactgaagcgttattgaccagctgctgtaccttctgcatctcactccacgctcactgcctttttctcttccttgcagttggctcctgtgcctgtgccggctcctgcaaatgcaaagagtgcaaatgcacctcctgcaagaagagtgagtgcagggccttccctgcgaatctgggggatgggccaagttagagcagggaacccagagctctgcaggcaggggcaggccaatgaccagcttccccaaacccctccttcaacacctgattcagaatcagacctcaaattgccttaaaaatgggtgagtcccagcctcttattaccaaactagaaactgaggcccagagaggttaccagatagtgttgggaacaaagctggaatgtgaacctaggtctcctgcctcctgatgcagccttcttcacccttctgggtcctgaagcacttaaggcccaggatctggaagaccccgggtgatttcaaacctaatgatccagtcctttcctgcaggggtagcccagagcttccctagccttccccagaactgctgtgtcagggatttgccccctgtccggctgtgaagactttcctcatttaagggtaggttttggggaactggcctccttttgttcctgtacccccaatcactacctgtccagtcttctgtcctgtcccagactcaggtggggctgggcagctttttcatataaaaccctcatcccaaagatctaccagttctcttctgacaaagccatgccatcctgaaatgatggtcctctggggctggaggcagggctcgagccaggcctctgttggggcagggaggtgcctgattgagtctgctctgacctctcactctccccttcttctccaggctgctgctcctgctgccctgtgggctgtgccaagtgtgcccagggctgcatctgcaaagggacgtcagacaagtgcagctgctgtgcctgatgccaggacagctgtgctctcagatgtaaatagagcaacctatataaacctggattttttttttttttttttttgtacaaccctgacccgtttgctacatctttttttctatgaaatatgtgaatggcaataaattcatctagact

SEQ ID NO: 126 - DNA, 1881 bp, Homo sapiens
ttcttgtggggtttttcccttccaaatgtctcagggcgattccagtgttcccgctagttcctccctcccaggctagaacacaaatccttcccactccctgcctggcaaacaccttctgaccctcaggcccaaggcaatggcccacctcctcccaggctggatggggtctcctcctctctgttcccccagcccctgagcttcctgaggaccaagcttgtggcttcttctccttactcttcctccttggtgtctctatgttagagggccgttagcatctgctggggcctggtcgcattcaccctgctctgccactcactggctgtgtgactctggacaaattaacttctctggacctgcagtttctcctctctacaatgagaatactggagagtccttatcttatgggttgctacagaattaagtgacatctcacacacaacacacttcctacagtccctgttacacgctaaaagtactcaacatgcaacggatacgtcatcagtaaccaccccacgggtttactgtgatgctgcacaattattaagccttggctgctacagagttgtaacctgtctgcacttccaaccggtttgggaatgcaagcagcattcccaagtcccgctttcacccgcgcgctaacggctcaggttcgagtacaggacaggagggaggggagctgtgcacacggcggaggcgcacggcgtgggcacccagcacccggtacactgtgtcctcccgctgcacccagccccttccgcgccgaggcgtccccgaggcgcaagtgggccgccttcagggaactgaccgcccgcggcccgtgtgcagagccgggtgcgcccggcccagtgcgcgcggccgggtgtttcgcctggagccgcaagtgactcagcgcggggcgtgtgcaggcagcgcccggccggggcggggcttttgcactcgtcccggctctttctagctataaacactgcttgccgcgctgcactccaccacgcctcctccaagtcccagcgaacccgcgtgcaacctgtcccgactctagccgcctcttcagctcgccatggatcccaactgctcctgcgccgccggtaagaggctggggatgcccagtgtagactgtagcgctagagaagcaatttctgacccctctttctttctctggtcactcaatttcaggacaggagttgctccttcccaaagagttttggggtatctttctctccattctaggttattcggagccccctttttaccgttaaggagatctgagttaatggcttgctcaagttcccaggaatcggttgtggactgaggaactcggccccgggctcttagtacgccgtcccttgttcaggtatccagggacggttctcacctctgtcttttctccttgcaggtgactcctgcacctgcgccggctcctgcaaatgcaaagagtgcaaatgcacctcctgcaagaaaagtaagtgggatcctctctttcctctaccccttccctgtcctccagcctgtcccctctccaccatcctcaggggaattaaagcagtctggggatgccccattgcgcggaaattgttgcctcctcagtgatccttatcagggagagcaggaatccttattcccggtgtcgctagtactcatctctgccgcctcctgtctgcccccaggctgctgctcctgctgccctgtgggctgtgccaagtgtgcccagggctgcatctgcaaaggggcgtcggacaagtgcagctgctgcgcctgatgctgggacagccccgctcccagatgtaaagaacgcgacttccacaaacctggattttttatgtacaaccctgaccgtgaccgtttgctatattcctttttctatgaaataatgtgaatgataat

SEQ ID NO: 127 - DNA, 294575 bp, Homo sapiens
tggtttactgccccgtttcagttggagacaagaacggtggatcctggtcacctccacggagggaacacagagaacattcactgttaaatatgacacctataattaggaaaacctatggttttaccatagcagttttacagacgaggttatttttggggtgttgaaaaaacagcaattaaaagcttccaacacagtttattcatgccccaataaattatttccccaccaagtatacgctcttaaagaaacgcctgatgtctggcctcagtgtcctcacgggctaacgtggcaattattaagggtgtagaatttgagcaaactttctaaacctctcctgcatgtcttattctaattccacagccccttaaatcgcctccctgggatccaggcggcttggaaaaaatgaagtctgaacagccagagacctaaggaatcaagtttcatttactaagaaaaactagaaggactgcgattagattaggcaaggtgggaaagggataccggcaagtaaagcgccggaaacttacaacttgggttattttctaactggcgtcttgcaaagggacaccatgtaggtatcccgctcgtcaacttgtaaatgaacttcaggttctctttggtggcaggagaattctgaatgtgagaacctggcggccgttcaacgaccccgccctcggggtccccagggggcgtcctccggcaagcctgatcgtctggggccaaggcgcagggcgagcagggagggaggaggagaaccagggccggtggccccgaaagcacacacaaagcggcctgactcctttggtgggaacttccccggccgccagcggagcgggagcgggagggggcggcggagagggggggcggcggttcccctcgccgaggcggagaacagcgcgcgctaggctctgggcgcgcggcgagcgcagcggccgccgcctcctcccttccccgcctccgccggcgctgcctcctccctccgcccagctcggcctcccttgctccctcccctcctagctggcttcggcggggacggcggcggcggcggcgggcggggagggcgtgcgccggccgagaggtgtcggcggcgaggcaaaggaagtttcaagtggaaggtcgtccgtcggccggcgcgtcctcctgctctcctccgcagcatcatggcggagccgagcggctcgcccgtgcacgtccagcttccccagcaggcggccccggtgacagcggcggcggcggcggccccggcggccgcgacagcagcgccggccccggcagctcccgcggccccggccccggccccggccccggcggcacaggctgtcggctggcccatctgcagggacgcgtacgagctgcaggaggttatcggtcagtgcggcgggcgcggcggggccggcacaggccgggcgccgaggccgggcgggagggggcgcgggatgctgggctagcctgcatgcacgccctggaggcagagaggccggcttcggggcctactggcttcaacagttttttttttttttttttttttttttttaatttttaatgtatttgttcgttctatgagcgttggtgctgcaggaggcggcgcggcggatgtgactcgcactgcagacgagccgcatgctgcaaacttttatctcagggatcgccggggcggtggagcggaggaccaggcggcgccgccgcatcttcctccccccgcgtgccgggaccgcagcccgtggccggtggccacgcggacaggcagccgcgggtggggtgtggttgcgggggccccgccctgggtttccagggccccgggggccgcgtcctgggggactctgcgggcgcagccgctcctctgcctcccgtcgtgaccctctcgtcgtgggtaacggggccacgtagaagccgcggaggccccagtgcttttctgaggccggggaggatgctggcctctcttcctgacagccgccactccacgcccgccttgcagcccggctctccgcgccactcggcgcgcccgggtacccgcctccctccgtgccagggtgcgccgcctgccgcccagtccggctccccggggaaagcgggtgccctggcctcctgccctgcaccgggccgatgcttccctctgtttcaggccgagctgcaagagtgaaatccgaggctgccggtgatctgctctctgcctttcgttgccttctggccggctcacaaatatcaccttatcttacatttttaaatacctggcagagtcgcagggctcggcgttacttttccttgggccaagcacttgaagggccaggagatttgttttgtcccttgacttagaaccttccctattggatcatccagtttgagagtcttgtcacttagggaagcctccaggttaagtgggccctcagcgtctaaccttactgacgcagggatgggatgttgcctttccagaatcttggtatataagtacagcgatgaaaaaggagttcagaatatttatcttaagtattttttctaactttcacttcaaaaaattcttcacctccttttaaaaaaattaaaacagatataaaaatttcactaggtgtttaaatgagcctttatcacctgctattggggaataaaacagcatagacggaaatatatatataaatatatacataaaaatatgtgagaaaatgttgggcaggtccgtaacctaggatatatacaagcttcagataacctataataggcatctgtagacaaaattctttgaaaacccagatctttcataatttttgaccaaagactctaaagggatgagtcttcatgtcactgcctgaaatagcttcaggggcttctcaaagcctggaatattccatggaaacctctttaacctggcatataggccctgtaccctcaacctgcctgcctcctcccattgtctactcttcagtgattgcttcctgaatacaccgctgtcttccgcacatctggtcttccattctttgctgccttgcagaggctcttccctcctgtgagtgcccatctttgtgtactaaatctcactccgcttccaaggtgagtgtgaatattccttgaaaagccttctgcttctttcaaggcaaaatgccgtggtttcttctgcccctctttttacagacctcatagcatgtaacctcatagttgttatttgcgcaacaagatctgaaggcctgctgtgtcccaagcattgccccacttgctagcaatatagaaattaacaaaagtgatccctgccctaagttgttaggagacatagggaaaggatcctataggatgtgatgagtaagtactgggagagcccgaaggagggagtgactgccaggaaagagaaggaagcagagtatttcttagtagaggtcgtagttgagctgggttttaagtctgagtttgtaaggtgcttaattatttccactgttgccttcactaaccagctgtgaactctgacaggaagaggtgggccataaaagttgaataatggtatctgccacataattctccatagagtccataggattgggagaagttataatcaatttatatacctacttggtcaattattagggttaaaatacaaacgttgccttttgaaaacagtatttttttgtgaactaataaaatcttagtttaagttgagtgggattaatggcaggacttctttctgtttgcagtcccagcagtgttaattatggttggtcagtttagtggaaaaaaagaaatttacctgaggaatttgagaacaaaaacacctgcttattctaccctgacttttgcgcatttgcattgtgggaagggcttttctacatttaaagtttatctcatattttcccaactaaaagagaaagagttggcctgtgtggaggccctgttattgaaaaatcaaattgctggaataggtttttcgcaagggcttaatgtttataaggaattacaaacctgtttccatttagggtttaatgctagttgagagattaagactgaacttgtggttaagcacttttgcttaaacattacacgcagaagttagcagttcaaacactgaaccagtttcaacatgaatgccagttgacagcctttgcttctacccgccatacggcaggtgtcatatgatatgactccagcagtgtgaaccgtgaccagcagcaggaggctcagatgtgcctgaacagaaaaccaaaggaggcaccgtgttttaactttccagcatggcacgggcacggaggactttttcttcatttccttctgggcagagtttggtcccccaggattaagagagaataagtttactaaaatccaaacaaagcaggttcagttgtttgacttcagttttagaaaaataaacacaggattttgcaaacctaaaaataaagttttctctttattgtattgttgttcttgtgttttaaaacgtcagtggagaaattgtaatgctcttaggagtattctggttcataagtttattcatgacctggaaatgatgtaaaatcgatgggagggagctttatatttacagaggggttaaaaatgttggaaattattaaattccttcttccagacattgatatccttgtcttagtagatttcaaatatttctgtctttttggaggctttccgacctgtttatactcttcagccttgttaatctttgttccttacctctctaaagaaggaatttgggggtgagttgagcccccaaaagtaggtacccctacctttagaagtataaggggcacttaaagctatgccagttgaaaacttagtttatttgttgggggtgttaataatattacctagatttgctaaacagggaatgaaagtgaatcatataagtgtttacttggccatccgtaatggaatggagcagcctcaatgaacttctcattcaaagaattgtagtcattgaagtactaatttctgtatttgaattaggtgattccagcaatgttgttatctttgctgaatttcttctgagaaaccctagactcctgcctcagcaggagtttgtttgattttcttagggtttttgcaggatgcacctttctttatgtagttttatactagatttctcagcattgcttcacttttgtcccgggtggtcatttagaatgacctaaaagtaacaaattgccatcttagtcaacacgaagaatttgagttctagaatcctggacatggtttgacagagggttcctttgaatgctttatttctctcctgtgaggcattgtttatccattcaggtgcgttttactcaggtccaggtaatagcacatatggccaggtctttaaggagcaacagcctcttgtaaaatgagattgtaaatagccctgggcattcccactttgctctgtgctctcagagtttctgtggatttctatggtttgggggttagaattggtttttatagatatcctagaggcagtttgaggacagtggtaccttcgctggcgctagggtaagggagccggagcactgagtgtgttctgatctcccagacctttataccaggctgccttgctgctgcagtgggttctttgatcttgattagtttgtttgttgttgtttttaaaatactaaatgatgtctgaaatgctttgtctcaagacagggctttgattttcatttcatttcactttcttttttaataaatagaaaaatgtatatagaaatgttcttttgtattttgtatttttttttttttgataaagggtctcactctgtcacccaggctagagtgcagtggtgcaatcatacctcactgcagcctcgaactcttgggctcaagtgatcttcccacatcagcctcctgagtagctgggtctataggtgcaaaccatcatgcctgcctaattttttttttctttttttatttttaagaaatgggggtctcactatgttgcccaagctgctcttgaactcctccgctcagcgatgctccggccttggcttcccaatgtgttgggattacaggcgtgagccactgtgcctggcctctttatatatatatatatatatatatatatatatatatatttttttttttttttgtaagagtcttgctctgttgcctgggctagattgcagtggcgccatctcagttcactgcagcctctgcctcctaggtccaagcagttctcctgcctcagcctcccgagtagctagtattacaggcctggctaatttttgtattttttgatagaaacagggtttcaccatgttggccaggctggtcacaaactcctggtctgaagtaacccgcctgcctcagcctcccaagttgctgggattacagcgtgagtcactgtgcccggcctcttttgtattatttttattgtggtaaaatatacacaacaaaaattgtaccattttaaccgttcttaaagtgtgcaattcagtagcattaattatatttacaagataaatactcttttaaatgtgctgtcatggggctggggggagagatctcaagatctctcttgaaactgtggtaaagtgactgcaatcctttatttatgcatttgatttttaactagtgatattatgaattcttccctgacttttatggtttattgtatagtacattttgtgatggtgtttgaaaataagttgcagcagtgccggctctggagtctgacagcctggcctgtttcatgtcctgcaatggcggtcactgacgctgcgaccttgagcaaatgacttagatgtgtctgcactcagtttcctcattggtaacatagggatgataaaaatagggttgtgaggaatgagagaatgtaaagcactgagaatcgtgcctggcacacagcatgctttcaattagtcttagccataacttctatagacttcatttgctaatcagatgcaagttatcaggagagaacacagtcctatctttggcaggattctggagtggcttgaagatttctgtgctatgtttctagcagggaggaagtgggaaagagaggttgttccctattcccactcttgtgctgggctgctggaaggggcttacaaggggagaggcccctggggatctggcttccccttgcacctccactgctgtgggaggaaactgaagagacctgtggagctcctggcaatttggacagctcaggggtttaggtgccaaatggccctctgacaagtgatgagagcatcctgcgggaaggttgctgaagaggagcagcccattatgagagggctccgagaacaacctgctaggactgcacttttcctccacctctgagtttgcccggaggctgccatgctggcaggaaatgctgctgactaaaagaaacgctccctgtgtgtcccagccagtgcgaggacagaggccttcattttcagataaagtcatcaccattgcttccctgtctccttctttccctctttgcttttccctcagtttataaatattctcaagcctgtctcttatgtttaaatgacaaaagagaacaaaacaaaacactctccctacttctttctcctctggctactcggttatctcgtttcttcctttcactgctaaattgttggaaggaacctcccattccctctcagcccactgcagtctggcttctgccctttccctaagaaacccaagttactctctgaaatcactgtgactcttctgtggccagagccagtggacactgcagtccttttctctgctctctgcagggttaggtgccatctttcattctccttttggaaaggcatttgcttgagcttccatgccatgccttccttctggacttcctgtactcccttgcctgccccagatccacatctctgtctgtctgaagcttcaattaccacatcaaatgctgagggtcttcctgactgtataccagtgtttggactacctttttaatgtcttcgtttgaatgtttcacaggaacttcatacagttaaactcattgtctctccaccctggcctcagtcctaatcttgtttcttctatattcatcatctttagagccctcaagggcaaaacctgctggccatcctatactttcctgtctttgtccatctctcacatctgtttggtcaccaagtcctaaatactccacctccttgagatcttctttgatttgactctgactcttcatgtcagccaccactggtttagttcaggcccttatcgattcttatttggattattgtaataatttcctaaccaggttccttttttccattcttgtttctggctgtagtgtgcattgctaccagaaagatactgctataccaaaattcttgatcacgttgctcccaggctgaaatgcctttagtagctctcccgtcaccctcaagacttaatttgaagcacagtgtttaaggtcttttgggaattgtctcttgcctcccttttcagccacatcttgtaatttccagtctcaggacagactctccagccagtgggaaccttttgcagttgctgaaatgcctcttctaggcaagatttccctctgcttggaacaccattccaagacccttcccttccatttttcatctatgtagcaaagagctctgtcttttcttttaaatattgcccttattgaagtataatatgcatgtggaaaagtgtacatataaaaaatgtatatcttggtgcatgttcatgaattgaacacaccatgtaaccagcaccctgactgggcctctcttctcataccctgaacaagtgatttcttgtcacacaaacaatctctgcctctagagcccccctccccccttgcccttcaggctctgttgggtctttcgctccctggcagttgtcacactatctgcaaattgtattttccttgccagcctggctctagactgttaagtcttccttgaggacagggtctctcatctccctaccctgcatgtcataatagatatttaataaatgttttctggatgaagttctgagttttggggataaatactccttcctcaccttgtggaggaggaacattgcctgacgtctaaaaatttgcctcactggatcctgaggatttgatcttgcccgtggttaatgatggggtttatttagttgcgtttgggccaatcagcttaaagggctctgtagaaattagctcattaatcctcacagatcaagagtaagcactttgagtgcgtccacctgcctgtgttgtggaggtaggcaggcagaggcctggctctcctgaggtcttaggactgagaggtggcctttctggctggattaaaggacccagagctccctgccacagttctggcatccgtagacattgtagggtggagtggggaagtcccacactgcccttcaaaagctctagagctttcttttcttttgtatatcagtgatctctctctcttgctgttcatgtatttatatataacactcaccttgaagttctgtggagcctcttcctgtgtaggaatcagggctgctggagacgatcagggatgcaggtgaaacacaggagcagaattgcagaacaagtggctttcaaaggttgttaggatggcaggagttctatttttataacttataagggactgacatgataggatggctgtggtacctgctaagaccatagaaccgggtcattctaatagatgttataattcctttacagtgtactttttgggaaagtttttttttcctatttaaataaaattctccatgtaatcatgtgaagtcatacgttttcctctaggatagttgtgtttagattataccaaaacagctcttagttgaagtgattcaagtgtttcttttttccctatctgccatcaattggccaagtttttgatactagacaagaattcaatatattaattaaaaagtcatttcagacttggcttaactgaaaagcagaagagaaaaatcctttagagaatggattggcatactttatttctagagtcgatttagataaatactttggaatccgatgtgagtaaatgatatgtttcacatttcttctcacttgccaaacagttatttgagaataaactctggcttagctttaagaaacttcttggacattgaggattgagattaattgaccttttaaactgattgtgtattttgatatatgggaaaacattttaagatagaaatggtagagacctctacattcatattatccctgactttattttcaaacttcttccaggtaagtggcatttagtataactctcagaagcctagtattgggggtgctcatgtgattcttcccttaggtaaaaaatatacattttattgacatttatgggtttaggtttctaacttttagttaccactggagctatttgtcagaaaaaactagatggaaagtagaggtggatgactttctgccctgtgaatgatagatcttcattcagggagtattttggagccagtgacctgtgacagttgtgagacttctcataatcattctgtggatggttggggtcttagaagaagtaatgattttgttttgaactggttgcatcagtttgaaccagagtttgtactaagggtattccaactgctttatttcctactctgtttagtctggggattgaaaaaggattacattttgggtaggttggtgcctattgacctatcctgtgtagcttagattttaatttgaatcatctggttctctttctttctctcaggcaatgtcactatctctgtttgtttaattatggggtgactcaagaaagcaaaggaagaggagcagcagacggggtttcctggggaaggaatggcaggtcatggctggtttttataagtgagttcctaagtgagaagtggtacaagaatatagagagaattaggaaatttaattttagaagagaccaaaggaaaaaaaatccatcccagctgctttgtcttgtaactgaaaactctctaatggccaaagttgaagaaacttgcctatggtcccaaagtccttagaatcccaggctccaacccttcatgctaaaaactctcaataaattaggtattgatgggacgtatctcaaaataataagagctatctatgacagacccacagccaatatcatactgaatgggcaaaaactggaagcattccctttgaaaactggcacaagacagggatgcactctctcaccactcctattcaacatagtgttggaagttctggccagggcaatcaggcaggagaaggaaataaagggtattcagttaggaaaagaggaagtcaaattgtccctgtttgcagatgacatgactgtgtatctagaaaaccccattgtctcagcccaaaatctccttaagctgataggcaacttcagcaaagtctcaggatacaaaatcaatgtgcaaaaatcacaagcattcttatacaccaataacagacaaacagagagccaaatcatgagtgaactccatccacaattgcttcaaagagaataaaatacctaggaatccagcttacaagggatgtgaaggacctcttcaaggagaactacaaaccactgctcaatgaataaaagaggatacaaagaaatggaagaacattccatgctcatggataggaagaatcaatatcgtgaaaatggccatactgcccaaagtaatttatagattcaatgccatccccatcaagctaccaatgactttcttcacagaattggaaaaaactactttaaagttcatatggaaccaaaaagcccgcattgccaagtcaatcctaagacaaaagaacaaagctggaggcatcacactacctgacttcaaactatcctacaaggctacagtaaccaaaacagcatggtactggtaccaaaacagagatatagaccaatggaacagaacagagccctcagaaataatgccgcatatctacaaccatctgatctttgacaaacctgacaaaaacaagcaatggggaaatgattccctatttaataaatggtactgggaaaactggctagccatatgtagaaagctgaaactggatcccttccttacgccttatacgattaattcaagatggattaaagacttacatgttagacctaaaaccataaaaaccctagaagaaaacctaggcaataccattcaggacataggcatgggcaaggacttcatgtctaaaacaccaaaagcaatggcaacaaaagccaaaattgacaaatgggatgtaattaaactaaacagcttctgcacagcaaaagaaaccaccatcagagtgaacaggcaacctacagaatgggagaaaatttttgcaatctactcatctgacaaagggctaatatccagaatctacaatgaactccaacaaatttacaagaaaaaaacaaccccatcaaaaagtgggcgaaggatatgaacagacacttctcaaaagaagacatttatgcagccaaaagacacatgaaaaaatgctcatcatcgctggctatcagagaaatgcaaatgaaaaccacaatgagataccatctcacaccagttagaatggtgatcattaaaaagtcaggaaacaacaggtgctggagaggatgtggagaaataggaacacttttacactgttggtgggactgtaaactagttcaaccattgtggaagtcagtgtggcgattcctcagggatctagaactagaaataccatttgacccagccattccattactgggtatatacccaaaggattataaatcattctgctataaagacacatgcacacgtatgtttattgtggcactattcacagtagcaaagacttggaaccaacccagatgtccaacaatgatagactggattaagaaaatgtggcacatatacaccatggaatactatgcagtcataaaaaaggatgagttcatgtcctttgtagggacatggatgaagctggaaaccatcattctcagcaaactattgcagggacaaaaaatcaaacaccgcatgttctcactcataggtgggaattgaacaatgagaacacatggacacaggaaggggaacatcacactctggggcctgttgtggggtggggggaggggggagggatagcattaggagaaatacctaatacctaatgttaaatgacgagttactgggcgcagcacaccaacatggcacatgtatacatatgtaacctgcacattgtacacatgtaccctaaaacttaaagtataataataattaaaaaaaaaaaaatcccaggctcgtgattctgccctaattcagtattttcttccacttatatcacattgtttccttgttggtggaaaggcagatgttagaaatattattgactcgggccggccgtggtggctcagggacgcctgtagtcccagcacttcaggaggctgagacaggcagatcccaaggtcaggagttcgagaccagccttgccaatatggtgaaaccccgtctctactaaaaatacagaatgattagctgggcatggtggcacatgcctgtaatcccagctactcgggaggctgaagcagaagaattgcctgaacccgagaagcggtggttgcagtgagccaagatcacgccgctgcactccagcctgggtaacagagtgagactctgtttcaaaaaaaaaaaaaaaattattgactcaataaattttaaggtactactaaaattttttttttttttgttagagatggaatcttactatgttgcccaggctagtctgaaactcctggtctcaagtgattctcctgccttggcctcccaaggtactgggactacaggcatgagccactgcatctggcctatgactcaatagagtaaaaatatgtctgaataaataaatagagtaaaaatatgtaggaatcagtaaaaatcttatgtctttaggggcattaaaatgatttttatttacttatatttatttcttcatcagggcatgtttatgtaacatgtaaccaggttatatgtaaatatacaatgtcttcatttcagccatcaccttttgcctggtctattacagtagattatgtttttaatctttggttataatctgtcagtgaggtggaggtgggtgtgtgttgtaaagtaaggtggaggaacaggaagttgagggttgaagaaaagtacgtgaaatagacatacaccatgactgatcattagttggagagaggtggtcccttatgcggggctgatattttataacaatcagagcagcagcagtgttcccagaagaaaggggctagcaccacactgtccagcttggtagccactaaccatatgtggctatttacatttaaattaattaagtaaagttaaagaaatagggtacagtccttcggttacactggccacatttcaagtgctcaataatgaactgtggctacgactgccttacaggctagtgcagatatagactgtttccctcatcacagaaagttacatggggtggtgctggatggtaatttctcggaaatgttcaaagactggctaaatactgttatgatggctgtaagtagtgtgaggccaccttttaataacatgcaaaggtattgccactgacttagtacaaaaaggagacaggcatcacctgatttttaaaaaatgttttgttttcactctgtacctatttgcaagctagtcaattcatctcttcagaagaagagtattcttgtgtgtggtgaaacagatacccctgtcgacttaggaaaatagttttgaaatataagtttttatcttactgacttacctcattttggaaatgttcttgtgatgactaaacacagattctgtccaaatgaaacccaatattttcagaaatatcataatgtgtcatatcttaaaaaagatcattttagagtcttttggttggatatcgtagtcagaatcacttcagtttgtcttatgttatgaagaagggactgattataaggtttaaaaaatgaaattacaaagaagttctgaaattaaccctaattaggaaaaatagtaccaaaattaatttcagtcacttaaacggtgaatttgaatcatagtccctcttttcctttgagttagaaacattttgggatttgagtgagtcaaggattaatagtttatcctaagttacagatcacaaagcaagtaaaacatcatttaagccagttccttaatagaaattctaactcagcaagcactatttgggtaggatacctgctcttttgggagaaggaattaatgactgaggggtgggaaaaaaatctgtgtagggagattaagtgggtttaattttgggcaactcaggaacagtgtgtactttctcacatttagtgtcccttgagtgaccggagctgtaacagagaatgttttactatgtaatccctttaaaatttttccttgtatatgccctttcaagtttctgaagtctgaaacccagtgcctgaccttaaacacaagttgttgtggaaacatttttaatgtggcacctttcctgaggagtcgggtggctgaaataggactagggaaaagtgtttctgtgtagtttcaaaatgtgatcattaggatgaacgtaagaatagtaatatttttggcataagtcaagatcggggctagagtgtttagtaaagtaaatacccatcagttgtttaaaaagtgacgatctctgatctctagggccaagagatgatgagcctctcagttcatctatagccgtttttgtgattgtcttcataaatgctgcaagactttctgaaggctataatttcatgtcctgttctttttttttttgagacagcatctcactctgtcgcccaggctggagtgcaatggcgcgatctcggctcgctgcaacctccgcctcctgggttcaagtgattctcctgcctcagcctcctgagtagctgggattacaggcacctgccactacgtccagctaattttttgtatttttagtagagacgggatttcaccatgttggccaggctggtctgaaactcctgacctcgtgatttgcctgcctcggcttcccaaagtgctgggattacaggagtgagccactgcgcctggccttcatgtcctgttccttaaagcccattggaaatagataatataggcagctttgtaacatatttttgcttaaacagtctttatggaaaaggaggataattgaagttccagtgactaggacaggtaaaagttacagttggatgctcgttttgttcgtctatcatattaaaaaatgaaattatttttagccatatgtagttgtttaaaattaaatatttccttgtcttttggagctacctggaagaaagggagtgacaaaaataggaaagatgatctttatgaggtatgactgaccttcaattaatcatatcagaatttttatgtacagaaagtgttctttccttcagggggatgtgtgggagggtgtccatttttactttatagctacattttatattaaatgaaaacttagatcttttgccgcaagcaggcttatgttgccatcggaagactatgtgaaaaacgtgacagcaagtgtgtgatttgtgactcctgtgtgcgtccctgcactctggtgatgtgatgagtgtaactgtggatcttaccaggggcactgtgtggtctctggaggtcctggagtctctgatgcctattattgtaaggagtgcaccatccaggagaatagagatggctgccaaagattgtcaatttgaggagctctaagacagatctcttctgtgaatgcaaaaaatatggctacaagaagaggtgattggtgggtggccccttcctccccccacatcaagctgctgcagctgccagaaaagatgcctactattaccagcagagagggagcggagcccagagcatcaccaggagtgcctgctagtatactggcactttgccacccctcctctcccttcacccagacacgtggtagggatggaaaaggattcttcacagagcactctggcacactgtatcagagaaaaattgatagattagttagtggtttttcttgaattcgagaagcaaagatctgttctccatattgatatgttctccctcaaccaagatcttctaaaaagaaataatattttagtcttctgcttgaggagttgactgtgaagctacacccagtgaaaaacatgttcttgcagcagctctggtggcagctgtccttgaggaaccttcggtgtgtggtgggaagctatcagaataagaaatgtagccatttaacacttaaccatttaacatcttttaacacttgtgctggtgtcatgttattttcctcctgagaaattggaaatcctttctgttgttattatgttaacaaaggtggtggttattttctggtaaaaaacaacagcagcaaaaaacttagccatttctgtcagtcctcctatgaagaaatgagactaattttctaaagtgacattaatttgcttttaaaatacttccaaaaatgttttaagcagtggtatttgtattggaataagtatgtaaccttacaaaatgactctttagcatgacagtgctgttagttgtttaccatcagttttgtttactattatttgtagtaaattctggatcactatttcatagaagtgataagactaggacttggttggagattacagtgagctgttggcatagaggtagggattgcaaaagtaaaagctgatggtagctgagaggagtctggtagggtggtgggtgggattctgtagtcaggtctgtgaagccagggagaaaatggacgggctcattccgaagcaaagactactacacagcagcaagagacctcaaacctgagcaggtctgagaaagggggagaataagaacttgggggcatttccaagtttacaatttgcaggacttgacaaggggtcaaggcaagggacttgatagggagagtgtaatttttccaaggatgattcagcagcagcctcttgttgaggtaggtgcctcttttgaagttttgccagcgagggtgcctctgacagactgaaaggctcggttctctcatcatggattctgacattccctgtatcagctatctatagctgtgtaacaaagcatcccaaaacttagtggcttaaggtaaggaccattgtacttgcttataatacaagttagcaatttgggtttggctgggctgggcatttcttcagtttggggtcagacccatggtcagcttggctggggctcttttaagatggtctcgctcgcgtgttgggtggttggtggtggctgttggctggccctcactttccactgatttctcatcctggaagaaacttgcctgtactttgtttcttggctgcagcagtgttctaagatagtgggagtggaagctgcaaagactcttgaggcctagtcttggaaagtcacacaatgccactctgccacattccttgggttaaagcatatcacaaggccagcccaaattcaaagggaaaggagatagatttttctactttttgggaggagtggtaaaatcccatggcagagggatatatatacaaggatggaaggaattcttattgccattttgcaaattccttgccacagcagctcaatttagcacaaggaagatgaatatacaatatttgtcattcatctaacttttgtttttcacacgtattaggggaaactattacccaactacccttgtgtacactctcgttgttatagtgccattgattataggtttcatagactaatttgctgtatgaactaagcatcagagtgatttttgctgtagaagtggcttcaggagtatatcgcttgctaaacaatctaaagatgttgattccaatgtgatatttgaaggggagggagggtgtgtgtgtgtaatgctgatccttttttagccttgaggtgttttattccagactgactttcttaaaactcaacaccacattaaaaacatagattgtttgcatgcatatgtatttgtttctcctgccacctacaagtcatgagctagatttgtcacagcccgaaaaataacacgttatctgtgcatcactcaatttaaaggtagatttttgcttaattaagaaagtttctttactttgaagtcaatccagcaatattttattccccgtttcacagtttttcaaaaagaattgctagcctattaggatagaaatattagaagctttgtaatagttactgacagaattacagagtttgcctctcttcattttttttagttcttgttttagttttttttgttttgtttagaaataatagaaggaagggagatgtactgttataccttttaatttttttttttttttgagtcagagtcttgctctgtcacccaggctggaatgcaatggtgcaatgtcagcttactgcaacctccgcctcctgggttcaagcagttctcctgcctcagcctctggagtagctgggattataaggcacctgccactacacctggctaatttttgtatttttagtagagatgggtttcaccatattggccaggctgatatcttggccaggctggtctcaaactcctgaccttgtgatccacccgccttgacctcccaaagtgttgatattacaggtgtgagccaccacgcctggcctattttaccttttattaagttgtaaagtctggtaaaagcccttatcataaaatattatatgcttttagatgtgggaagagggctaaatgttatctttataaagttagagatttaaaggctaagtgacctgtttattacattggaagacaggtctggacgtgggattagaattgtggagtgtccttcctgtggctggcctgagttcctttctcatgtaaggaaaaagcactgagaaaaagatgttatctggatctctgaggttattaaaaattccaagcttatttaattaatttatttatttgagatggagtttcactcttgtccaggctggagtgcaatggcgcaatctcggctcactgcaacctctgcctcctggttcaagtgattctcctgcctcagcctcccaagcagctgagattacaggcatgtaccaccacactaggctaattttgtatttttaatagagatggggtttcaccatgttggtcaggctggtctcaaacccctgacctcaggtgatctacctgcctcagcctcccaaagtgctgggattacaggtgtgagccgctgatcctggccctattttatacttctcaaatattatacaaacaataatataaggtcattgtagaaaatttatacaacactgatgagtgaaaaggaggaaaagtaacctcatcacccaaggctagacactgtttgaattttgatgtaggagtatatatttacatggcatagaactttaaaaaaaaaagtgtaaattgatatttttagaaatgtctaccttttttgtattcccagtactttcacatttaatttgttacggcaagtaaaataaactagtcttagattaatacttgcttggcaaaagtgattttatttcttgagattttggcatacactgacaagcatgccttatgattactgcaaagtgtgttaagtgtattttttctcatacttaaatgttttcagaatcacggaatacatctaatacaatctactcttaatgtctgtgttacgacttagatttcttaggagtatctattatactttgccttttgtcttctagatactattggatcaccttattctgatatttggcacttcgttgattggtagaaaaatcgttttggccaggcgcggtggctcacgcctgtaatcccagcactttgggaggctgaggagggcggatcattaggtcaggagatcaagaccatcctggctaacacggtgaaaccccatctctactaaaaatacaaaaaattagccgagagtggtggtgggtgcctgtagtctcagctactcgggaggctgaggcaggagaatggcgtgaacctgggaggtggagcttgcagtgagctgagattgtgccactgcactgtgagactccgtctcaaaaaaataaataaataaaaaagaaaaattgttttacaaaaagttctggcacagagagaagttaagagtcagtaactttcttactgtttgtggatgtgtttgaacagagtagtgacttttggatttcatagtgacttcgtatgaaacctagagctggcagcatgaggattttctagatgaattaaatatgtggtatctttttgtagaactagctgtgtgatttcatgcggatgtgggagaaatgaataggaatttaatttgatgatatgaatgttgaattttgtggtccgctaaattttaaggattttatagtatttagaacaaaaggacaaaatagcttttggcatgactagtctttattttaaatgttttttaagttacaaatgtataatatttatgaatcaagtagatgaaaataactcccaactttcattgcccagagatggcctgtatggccagtttggtgtgtatccttgcagatgtttttctatgtatacatctacataaagatttttccaaaatgtaataattttacatgtaatgtggaaactatacgtattgttctgcaatctgtaaattttacttcttcaaagtaatatatatatattacttgggtattttacttctgtatattttctgtaaatatttttagtaaagtatacacattataaatattcacagctgtcattccaggctatttctcagagatccacctcctttaaaaatgtgtattctggatccattgctattctatgagtgcagctgaatttacttaactaattcctttattgatgaacttattgattgtttccaagtttttattatttctgtgggatagatatccagaatttcagatggccagggccagtggtattgcatttatacttttgatagatactgtgacaatttcttccagttgtactaattaaatgctagcttatttgctcccattactgaccttaaaggtaagagggagttatagtgagaaggcatcttgccttattcccgatttgacccagacctaaaatatctaaggtcaggagaaaatggtgggtggggtgaggtggggtgggatggttgggtaattgtggattggaaaagaaaaaattattgcctcagtttagggaatgaaagttgcatcacttatggtctaaaaaatgaagtgtgatgaagtttatttgtatgagcaaatttatggaaagatttttttgagttggtgagcagtctggattatagaatataacaaaattggttaatctgccctttaggttgtaaggaacagggactcactaaaattacccaaataatggggcattctttataaaggtagatgtgggaatagggggacaggaatctcatccataatcctgggttttctagcatcctggaaaagttgagggtctcggtcttgggaattgcagtgaaatgtctgcatatggactgggaagtggataagacctcagcagcaggaaactttggatcctcactattctggatcctctaaccttagtgtaaccggccaatcagcatgtgtttgctttgctcatgcccacctgcttctctggctgtttttacctggctttcttacctactatctgtgcatgtcttctctgtcatgttgtttctacttagtcagaattttggctcactcatagctccttatggcccatccagcttctctcttctttccctgttagccgcaactatggctgctaattgctggattctgtctgtatttcccaatcttaatcccaaagattgagaatctagtttttagtgagtcccttcatagaacacctgactgccctaaactcagacaccctccttggagaagggtgtagcatcggaagttcctgcctgggaaggaatcacaagtgtggcaggcaccactagtgagtgttttatgtaatactgctcttaggtaagtaactggtcacgagacagagacgacatgtcaccctaatcagcaaaatgtaatcctgatctaatgtactttctttgttaaaatatatacttacaatgtgtttaaagagcagtttattgttttgagtcaataaataactttcttccctaggaagaacctcccttttcccttatggattgtaaattgggaaatcttatgcccagtttcagttataaattgtcttaaattctgaaataatgatacccgaatcctgagatatggtctggtcttgccttttctgctggatttaaagtactatgaagtagttcatcctgtttatgtaatggtgataaaattctgaaaaatatacctggaacctgatactctttgaggaactaactttcctatgtcaatagttttatcagcagtatcttctccatggatattgagaagagaatctgatcctcccaaattttatgatgtatttgatagttttatcagcagtatcttctccatggatattgagaagagaatctgatcctcccaaattttatgatgtatttggtggtccagtgtttcagagatgcaagtttgttaatatcccctggaagatttctcaaggttgctttgttttcctcttcagggtcactattaagtatccctttttgccctgttctcttcctcctgaaccccattctgcttcactttcaaaacgatggctagagggttggatatgtcagtgatcatgaactgctgagtcctaaactttggtgtctgtgtccctcagaacctcaaagggcagtttccctgtgactttttaaaatgagaaccatgttcatgaagtgctgtcttagtttcagatcacttgaaatgtaatctgatttgagagacagtgtttaagctcctgtttaccaaaaggctgttttgattatcattttgcaggaattgttgctgggtaaaagacaaatgaacaacgtactcagaagagatgaccaaatggtctgatttcatgttggaaagtttcttctggtggtcttgaatctgcgttttaatctccttaaaaatgcctttttagcacataagcaaaattaaacattattgttttattaaaaactatgcagtgctccttattagttaggagaaaaatctcttaaatcctttttgttaaggacatgtgtaatttaaggctttcattttgacagcctggtttcagctgacaggtatgttaatctctatttgattgctttggtgaggagttgaaaatcacctaatgcctggcttagtgtgcatttgtaaatgcgctttcttttggttttcatttcatgcaataatgaaatgaattttcctactgttattttgttatagattgatggtttatctgattaccagatttaaataaacagttgaaccatattccctttgactgtgtccccttgtttatccttttttatttgaatgctgatgggtctttataagcattattatcagcattattatcagtacatatgtatgtatagagcctcttcatcagttatcttgtagcataacagtgctctaagaaagcgatttttttttgttgtttgtttttttagtttaagaatttcctattcttttctattttggtttaattttcattactcttttctttctccccttataagtgccaaagtttatgtgaatatgattatatatagaacatatgactatatataatctttttttctttatgtttacagaggcaaaagatatatttgtgtgtttatgtgtgtaaagtaatacatgacaaaagaaaaattatgtgtaatagaagtaatttgactctggggagaattttactttacgttttgaggtagagcaacctttagaaaaaatattcaaagtcaaaattctgggagggattttttcctccataccaggaggacttttaaaagcaattcaagtcgaccagataattctgatacaaacatttatggagcacctgccgtgtgccaaggactggaccaattactcagcatacttgatgcctgatccgttcctcattcctgcgagggttggtgtgattatctcagttttacaaatcaggaggcagagacttggatgatcacagtcagttgaaggtcacgcagctggatctgaacctagtcttggctgtttgcaaagctgtcacccttgctatggtcctctttgcctccttcacttttgctgtctgacctagctttatgattctcaaacttcaggataagaagtgaattttcttttctttttttttttttttttttgagacggagtctcactctgtcacccagactggagtgcagtggcgcaatctcggctcaccacaacttctgcctcctggttcaagcaattctcctgcctcgccctcccgattagctgggattacagtcacgtgccaccacacccggctaattttttagtatttttagtaaagacggggtttcaccatgttggccaggctggtcttgaactcctgacctcaagtgatctgcctacctcagcctcccaaagtgctgagattataggcatgagccactgcgcctggccaagaagtgaatttctagaagaaaggtccctatttttaaagtagcatcacttggcaattggaggaaactccaggcagaccctggttcagagcccagtggcatcatttgctagctttatgactgagagccagttacttggctcagtgtgttttgtggtgtttcagcaccaaatctggaccatcatattggccttgcagagttgttttaaggattaaagatcatgaatgtgcaatacatagtaaatgacaatgatgattatgataatagcagttagcactgaggagttgttattacttgtcagctcctgggctaaatgcatttcatatttagctcatttagtccatacaacaacccaatggacaggtattattgtctctgttttacatggaaagaactcaatgtgtgaagtctcttgttatttatattttccacatcagtgtacccctccattggtatggctaattgagaattcactgactagagaattcaccgtcatgcaataaacattagttaagcacctcctatagggtaattaagatagataaaagttctcttttcaaaccttatattttagtgattactttttacctatttatcctctaactggttttatttgtggtgttaaaaagggattaatcttatggtagcttaagcacttaaacatttcacatacagggaaatcatgaatggaaatgcttactttccaaaccactttttatgtgtcttcaaaataattaatgctactacattggtaaaaaggctcagaagatatgaggagatgaggaatcttctaaaaataccctcttactactcctctcgttctttcttccatcacgcaaagtacctaaaaatgcaattgataaaataagttgcataaagcagcaatcctcatggcctgtcatctctccagagcaatgatggggacattgggaggtttagaaaagttattagcattaatgctaaagtgctgacagctgaaaagagcacagaggaattctggcagtggactcacagttcattatagcagggagagagattcctacaccaagtgaaaacactgtagggtttcgctcatgtgctccccaccattgaaaccagactggaatattcagccaaaacagcagactgttagatatttaaaagaaggaaaaaagatgcaaatacactactctataaacatgcctgtcatctcctggctggtagttcaaggtgccatgtgggttaggaaagttcttccttccatgttagagaaagtggaaccatacttattaaatcgtgaaacagggtgggaagagtggagagtctattctttagaaagacctgagcaactgtgagctggctgaaggtcagaatttaaatctccctgctttttcttgatcagacgatgggttaattatcctccatctctttattcggtctttgttgcgccccggtgagtgccagcgttgctacatcttggtgatccaaagaagaagtgccctttacggtctgaccttgaggaacttggaaagtctgcaggagagaaacaaacagggaaatgattataccctttgaggtaattctctggtggaggtgtggtaactaatcgttccatctccaaagtcctcctgtctttcatcagtagcatgttatatagttgtactgttgatcctaaaggaagggatttcaattccaacttggaaattccagccatctattctgtcttgcggactagttgtcttgttccaagatagactagtagtgagagacaggactaatgttttcatacaactttgccattttgttcataaaaagtttttgaagtttagtgctgcctatacaaacatggttaaatgctaacactaactgaatatacatgtaagtgtgtgtgtatttgttttttgacacgcatgtattaacataatgttctagcttgtatgtaaactctggactctgagacaatcaatgtttaaactttcaacaaggaagagaaataacgaaaagaaacaatggtttttttgttgtacccagcaactaaatttaccattgttctaagaactcgacaaatgaccacaggatgtgaacttaatcgagttgtgcctttgaacaaaggtatcctagtgatagtggaattttttacttcctatcatcctgctcatgtgttcacttgcctgcctcttctgaaatcaccagcagttcagtatgacttaaccaagtaaatgaattactgcaatgcaaaagaaaccaacccaggaaacaagaggaatcaccattatttctgactctgtctcctagatcagcattcgaagccaaagatttccaccttttactggaaaaatactaaatgaagtgactcacttttaaaaaaatgacccctgcaatgcagcctagatttaattgaaggtggtatttaactgaaagtgagggcagtgtgtataatcttaatctcctcagtcggacacatgttcaattgtattatctttgagaaaaagtttttattgcatccagaagaaactaagcaagcatttaatggagaactgttaggaaccaaaatttccctagaaatattgcctttgattttatggaatatttttcttgatgcaattgaaatgacttgcctttgattttgacatctcttttggcgttgactatacatgtcatctctttgggagaggagagctgtatccatgttagtcatctctttcacctatcagtgctctattaatcgctgctctgccaagtactttttacatgcacatctcatttaagattgatatcaagccaatgaagaaaatgaagccaaagatttaaaatatttgctagggtcaaattgagtttctcactctccagagtctgtaaatcccctcttaaccattatgctgtgctgcttagagtggttttctctttgccccaggagaactctcactagataaaccaacagcatattcagtacatgtgtgttgcttctcagcagagaagttctcagctttgttgggcatttgttgctgttgcgaattgagttgtttagtttcctttcattattggcacatgcttgtgatcccagcacttcggaggctgaggcaggaggattgcttgaggtcagcagtttaagaccagcctaggcaacatagtgagacctttatctctatttataaatgtatatattattcacattaaaatttgttaaagaacaactttgattatcatcattattcaaatactcaagcaaaggaaggctctccatctctttccttggacagtacctcatagcataccattatgtttcaaggtgcattctatagtaagatgagcagataatgcttggatgataaagtttaaagtaaacttgtaaatcaaaatttgcaaaaaaaaaaaaaaaagcaagaaaagtaggttaaaggaacttgacgtctcctttttaatatcaaggtaacttgtcagggcctggaaggcatctatcaagttgtgaacactgtctcgtctttttaaatggtgattctaataaatggcttttttagtttctaaacctggaccattagacaacactgagattggtaggagagcaattgtgagaccagagttttgttgcattgagaggagtgcttgcttgccccagaccacttggagaaaaagtcaggaatgggttagatatgttttctttttctttagctaagggcatctgtctgactggcattgggtttggacagtagagggatagaggagacctacacacaactctctatgatttagtaggaggcaaggaagtaaaagaagtcacagaaaagcctccttctccctgaggaagtggacagagatagagacctcttccgtccagggtaggaagtccccatagtgcctgacttatctgtattctgctaggcttttgagcaataaattgagagttaagtgtatgtggaaagtatctgaacacaccgaaaatatctgaagattttttttttttttgaaacaagagtctcactctgtcacccaggctggagtgcagtggctcaatcttggctcactgcaacctccacctcctgagttcaagcgattctcctgcctcagcctcccgagtagctgggattacaggcatgagccaccgcgcctgaccctctgcctactttttagagtgctatcatctcactttttcttccttaatatacaaattatgtgaatctttcaaggttccacctaaatgcccaccccaaattcttgattcatatgattcttagggaaaatgacctgtagctgtgtaatgtagcagcttgggcataattatagcttatttcgtctggtagctttttaagttcctgaagaataaaaagcatgcctgtcctgagttttatgtagtaagatttaacacggttcgtaccactagttgggagctggttgttatttgttgaatggatgcatgaacttctgtcaatcttttgattctcctaatagctttctctgtgtttaattgaggctttccccacgtctttttcagagtctagagcttttggaatctgcttttatttcttaacacttgatttttttgggggtggaggaggagtgtattctgtgttcttctgtttgttctctatggctggaattacttttggaaagatgtgacactgtttcgattttgtctctgagcctttttactcagacaaaatcacaggagtttctctcaggacagtcatgttctttaggtgacttggcccttgctctagcaagcctaccttggttgagcgtttggctaggagaagtgggagagcagttgacgcaaataccgctgtcctatgacctgaccctggtatgcatggtgctgtgccctacggtcactatttttgatgataggactttgtccagtcagcttagcggaaaagatcatacatgttgaacactgcgaaagtgaactttcccaagatattcttttggggaattttctgagcttttgtggttctttacaagttacttgtctaatttgtacattcacctctgctgtcccatgggccttggcaagtgacagctgcagtgccgatgtttcagagtagagaagctttgttagagtgtggggttatctgggaactctcttccaatttatgtggtctagttctgtttaaattctttctccattacaattccctttagcaaaagttatgccagtaatttccatttattgcctccttaatgatgacatggtgttaaaagatgtttatatgatcctacatatcttagtactttcaaaataaagagacttttagtgatttactgctaggaggctatttctgtctaaatcatgataacatggacgtgatcttagaattagtagttatgcttttttcttcctcccctccataggagactatgtttctagggctggctttgactattaaatatgtctacagtcagtcctccatgtccatggcttctgcatttgtggattcagttaaatgtagattgaaaatacttggaaaaaaatggatgattgcatctgtactgaacatgtacagactttttttcttgccattatttcctaaatgttatagtataacatctgtttacatagcatttactttgtcttaggtattactctagacatgattaaagtatacaggaagatatgcataggttatatgcaaatactacatcattttatacagggttcttgagcatccatgaattttggtaccaatcccccacgaatactgaggggcaactgtatatcttttttcttttgtgggaagtggggccaaggatcggataatctgtgatcctcacataaaaatattctgaaatgtcagtttatatgattctttgatttttccagatctatatttctgtggtataggaaggtaataaaggttacgataaagaaacagagtattccccgtcctgcatccggatactggcctttttctgattgatagaaattggggttttctaattcatgctgaatctgaatctcctcctccaataatgaaggtccataggaaattctaccaggtggatctgtaatggaacatgttccctgtgtgacttaaggaattcagactcattactttctaggcacccttggtggaatgttcttcaataacatgggagagtgggatgcttttgaagacacaggtagagctgcagagaaacacgtaatcactgattttcgtgttgtgagtttattcacatcataggataatggcttgtggaaatacaaccctggcaggtctgagcagtcttcttttcccaacagagcatgtctgcttctgctgagaacctaggactagagctcaccatattccaaccagcgcccctctgggctcctgggctggcttttaaaaaagccttgttcctagcgggttggttgggtaaagcttcctggtatgggaaaggggcaggtatgcaggtagtcaccaagctggggagtgcctggcacagagccggtgaccaagacctctcaggagatgaaagtccgctgctgttcatgagatcatccatgcctaagaggtgtggcggtggcattagccttggctttagaaagttgaaagcacacgaataatgtcttcttttgaaggtggcttataacaacgtttctttgcctaaaaactcgtatttctgtcaggtttgctcaagctgaggatggcgatttgccacttcattagatgactcacgtcactgaaaaaagacatttagccccttctcctggactgtccaaacctaggaatttcctgcaggaatgccaaggagatcttcaaacagccaaacacaacttttgccttggtgtgcaggcgtgcttctgtttctgtcaaaataaattaggctgctaagtcgtaaattaggaaaatattttgctacttgtgtttcttatttagcaagtagaataaatagctggcctcaaaacaaaacaaaaacccaaaccaacctcaagtcgattgacagaagatgattctgcctttgccaagagtgaggacgtaccttctctgggagacaggaagccttcatctgtctccctctgatttgactcagtccttaccttccatgtacctctggtcaggtcaccttgcccatttctcccattgcccttcatattgggttggggtttgcaggcctaaggaggaagcacgggaggcctatccatatctgaactctgtttcctgtctctcttccaccaatgtgaggtttctcctcacattgcttttacccaatacatgaaagatttcctttgtcaagcttattggaatgccctgtgggagggatgctatgcaaaaacataaatgtattgcataactgcccagtccttagagatgctagagcatccttggcaccttcacagaccccactctctggtcagtccctagagagcagggtgaggtgcacttgagaggtggctttgtcctctaccccagtaccatggtccatggtgatgacctttatcccagctctgataaaaggctattttaggttttctaaaatacagttcctcacctagcccagaaaggaatatttccattttttccccctttcctcttgtctgattatttccagctgctgttcctttacacgtcagatttgtttctcctgtgtcaccttgaggcaactgacattcgtgactaattattagaaagggcagccttttagtttattttgatgaaaaagtctcagagaactctgttagatacactgtatttgagcaggtgacatgttgatgtttgggatttgggaaacagatccagcaaaagtagagtttttagcatggtagctggaggagtcagaaggtccaaggagagcttcatgaacttatttattgctaacgccctgtgtattctctgaactaattccaggcttttaaacttaataccaaacagccaggccaggtggtcacggggcttacggaagggtcatcttggagcaaagaaccacacaatgaactcttatccagctaacgttttttttctcccctgtaaaatcaaattaaatcaacctcagtttggaggatgtggaaatggggggagagtatgattggagtcctggccatttggtaatgccagtggtttgtgggagcagtctggctatgaaggatgcataaaaaacaactctacaatttaaacttatttcagaaaagggctttttgtttggcacacactgttgcaagccatttttgatccttcattgtgaaaccttcattcgttggcatattatataaggtcagcgcaaatacggtgttgaaaacacatggatcatggtacatccctagagctgtaaaagagactgataaaagatggtatgtactaacatgaagagagctccaagagatatactactgggtaaaaacagcaaatgacaaaatgaagaatagagttgctaccaaaaaggggcagcaaaccaatacactcttttggatttccagtgtagaggaaaatcttacctcagttcgtggcacacagttatcagtggtctgggcaggacctttttcagaattaccctgtacaacattatttcttgactttcttttatccttattcccttactcgtgcctttcccccttagtcaaccttttgaatatttatgtatatcctttgtatatattcttgtaaaacatgttattattttacatgcttctttttctgaggtgtaatccacataacataaaattatccatttaagattaacaattcagtggcatttagtacattcacgacgttgtttaaccatcacctctgtctagttccaaaacatttccaccattccccataccatgaaacagttactttccattttcccttctcccagcccctggcgaccacctgttctggatatacgtcatatccagaatacaaatggaattaaacagtatgtgatttacctattctggatacactatccagaatataaatggaattaaacaatatgtgatctttcgcatgcatgtattttcaaatcaatctttattgagatctaatttacgtagataaaatgtacccactttttagtggaccttgtgttttttttttgttgttgttgttgttatttttgacatctttcacatttgcttacagcaaccccactaggcaggcaccgtcatcaccctgttctgcagatgaggcttgaggctcagggatgccgagtgacttgcctgggattgcatgacagcttaggatgtggaggtgggcaggctggctctagagtccatgctgctccaccactgttgtccaccggcctctcaggtcttcacgtgggcgatttcagagcctgcctttttccacacaacattatactgtttatcaggttgataaaaagtggctatagaatattctactattcgtatataccataattgaactacttagcctttgatggatttttaggatgtttctaatttttgtttgtcagaaaccatattgaaaggaacattaaggattaaagaaaattctaaagtcatatatattcattatagaaatatgagcaagcaaggaaaataagctaaaaacatataaacattccccccaaggttaactgctctatgcagtttttcacatggtgttccagtttgtcttacacttttttttttttttttttttaaatatggctggcttttgtcacccaggctaagctggagtgcagtggtgtgatcttggctcactgcaacctccacctcctgggctcaggtgatcctcccacctcagcctcccgagtagctgggaatacaggcacacatcacgatgcccgcctaatgtttttgttttttgtagagacagggttttgctattttgcccaggctggtcctctatatatttttttttaataggaaaaaagcacttgagaaaggacgatatcataaatgaagttttgtaatagaaagtttatagtatactgtgaacatctttttatctaacaatagtgaatatttactaagtgcttaacacatgacagggactattttcatgttttaccctactcatggcaatcatttgaggtatgtggttattatggcagatgagatttgtgtgtttttaaatctacacaaatagttttgtgctctagcacttagtatttctcactttctaaattcagcgctatgttcttatgattaatccatctatctaccttgttagacatttgctgtcaccatgggtttccttatctcttcttgcaactcccagtttccacacacagcgttgcagggaacatctgtgaacatgcactcatggatctgtgggtcgagtcactgggagacacatccaacaggatgaatggatcatgggatatttatgtacttaatatgactaaatattggcagaggcagattctcctccataatggctatcctggagtctatactcttctgctttatcttttttgtggtttcaaggatgtatgtataaatggctaggaaaaaggaccagaaagagatataccaaaccagtaacactgggaacatttacaaggaacccaggagggagaggatgatcggaggacccttaggctgtactggtcatgatatgatgtgttgtaaggacagtgtcttcacgtgtaacttactattataatttactgtttacaaaaaaggtctgaaatgtgacctttacctgaagtttacagggctatgctatgaacacatttcaagttgtgaatgcctggtttaaggttagtcatggagcatggaatgagttcttctttgcaacttagtgctctttgaggcatgctctaaacagttatcaggttataccagtgagcccttttcagacatttaactgaggtttttcacatctcacatggctcagagaggttgagtaattttcccaggagcacagggtcaggagagttggccaaggcaatgtggagaggtgggtcagaacagacaacttcatgaatgaaggcttgttcaggagggcttattggtctgtacttaaggttagggaggaagtcggtgctctttccctgcaggtgagatggggaggaaacattctcaagaacagtaagtttcagtagcttccttacgcaaacactccactgaacgaatatattcgtctggtctgtttgttaagcacaaggtattcagataatctttgcctgacaagctgcttttgtttctgtaaaaggaaggtaacaggaaggtcttcaatttacgactcaagctttcttctttcacctcttctaaagtgagagaaacaaaggttctggatgactggatgagatattttttaaaggtgccattcaggttccttttgggtattagtttcaactgagatgtctcattctttctgtggaactaaaacgaataatgatcagtaagtcatttttgaaagtaactgtgacagagtggggcagttaaccaccacctctccattcccagcagctggtatgcacaccctgattatggtatagacttagttaataagagaaccagtgagtgtttgtgtcagaattttgctttcagaaccaggcataggaatttatacatgaacgccctgtgcagaaagaggaggtgtttgcacacagctacactgacagattattttccactcttgcacagtgactagtacagattcctctcatgagctcctcagagacgtaagacagggcgttgatgatgctttatcaagtagacagtatgtttgctacccacaactaagtaaaattaaaatataagaataaattggaaggcagatgcagatataaagtcccatctttaaggcaggaatacttcctatcatcaaatattacccagaactcactggtttagaggttgaaggcacaaagcatggttgagaaggctgaactcctggcctgtctcttcacagggttggtgaactctggtaaactctagaacagaaatgacccttataaacaggtgcacatatgtggtgagtacctgatgaatgtgtgctgaccaataaataattactactacttcctcttgactcatgtgtttgaaatgaagaacagtcactctagttgcagtctatacttgtgtggagcagggaagttgagcaatacatccatatttagtaacactcttgagatgagatagatggggtgggagagataacagtcattctttgccttttgggtggatctaagttaaaatatttttattgtctagatttatagctaattaataattttttttgccctagaatattgagggtgcaagattttaaagttggatttagaggaactgaagtttcagtttgttcattgtgattacgtaaatagagaaaacggactaatacgttatactttctctttttaaccatataatgactactcaccattgaaattttgatgagcattttttttgccttatttcagagaaagacaagtgaaattataattaagttgtatattattttgtgtagattgtctcttctctagtgttcctgctgaaaacaaagaggagattaaagattttcctgttcagattttaaatccgttattcaaagtttgaggctgggcgcagtggctcacgtctgtaatttcagcacttagggaggctgaggtgagaggatcatttgaggtcgggggtttgagaccagcctggctgacatggcaaaaccacatctgtactaaaaatataaaaattagccgggtgtggtggcaggtgcctgtggtcccagttcctagggaggctgaggcaggagaatcgcttgaacccaggaggcggaggttgcagggagctaagatcatgccactgcactcctgcctggacgacagagcaagacttcgtctcaaaacaaaacaaaacaacaaagtttgatagtttgcttaactaatgggagtaggtgtcttgatgtgtgtgcagcttgtatgatccagtaactgataatgaagtttgcaacatctctaagttagaaattttaatgaaaccacaacatattttctttcatagcaattctctgagccagcatttcaagaaggggtgggaaaaaaatggtgataaatgacctttgaggtgaacttttgatatttgcattgcaattctttgggtttacacttttaatttttaaaattgcaggtgatatttgtgaaaagtgtcagtttccaatatgttcacagtagtgatagtatgactcaaaagaagtaagcacatatatgcctattttatcaatggatgtcttcagagttggtgtgccatttttgcagcatgggtgagaattgaggtttttctaattacatgagtttctttcttccttccttccttccttccttccttccttccttccttccttccttcctttctttcctttctttcctattttttttttttttttgagatagagtctcactttgtcacccaagctggaatgtaatggtgatcttggctcattgcaacctctgcctcccaggctcaagcaattctcttgcttcagcctcctggatagctgggattatagacgcctgccaccacgcctgattagtttttgtatttttaatagagactgggtttcaccatgttggccaggctggtctcgaactcctgaccttaagtgatctgcctgcctcggcctcccaaactgttgggattacaggcgtgagcctccgcacccagcctaattacattagtttctttcttttcgtttgtttctgagacagagttttgctcttgtcgccccaggctggagtgcagtggtgcgatctcggctcactccaacctctgcctcctgggttcaagtgattcttctgccccagccaaccgagtaagtagctgggattacgggcatgtgccaccgtgcccggctaattttgtatttttagtagagatggggtttctccatgttggtcaggctagtctcaaactcctgacctcaggggatctgcccacctccgcctcccaaagtgctgggattacaggcgtgagccaccgcgccaggccttacattagtttcttatagtaagagaaaggtttcaaagttatatatatctaagaatacacctaccttcatagttgagcttttttccccaaaatacatgtttttctggtggtctctgtattttccatcactttaaaaaaatctaacttattaaaagttatttgattttgcttaagactttcatcatcatcagtaaaaatttatgagactgcttctgtgcatttgcttcctacgggcctaggggtgcaaaggaaaggggtagaatctaagattctagggttaaccaaaatcgaaggtttgtaggcttctctgaatttaggtggaagaaggtggagaatgtgattctgggtggtattgtgctatccttgggatagccactaagcttgttctaccagtcaggctgggctgagctatggtatggtagcaaacaaccccacatcacaggagattagcacaacacaagtgtatttcttgctcttgcacttccctgtgactgtgggagatatcttaagtcagctgtccttcctgcagcaactcagtcagcttcagtcttgtggctccatcctctgttatctctagcagcaggaggggaagagtcatgggagcactgctcaggggcttccccgcctcagtgatggagaggtgctcatcattgctcacatttcactggccagaacaagtcacgtggtcctgcctatttcagggtagtgcagtgcttttgtgctcaagaaggagacatttgtaagccctagtaatgtctatcacacgtgtctaaatgagaattggaatcttggagaagacattggaactagagatgagaatgtgaaagatgttatgtacagaaaagaaaatggtggagtggattcataagggaaagcacataattacggagggtacagttttccataatggtgtctctgcatgtatctttattcacaacccaagcaatatgctaccctggactaaaaatataaggatagtcgtagccactgtcagaaaagtcagaaagtttctgttggttctgttgttgatttgtgtgctatgtggacattgtctgcctccaaaagtgtactttcacttgatcattttagggttatatagtccaataggttagcagatccttaaatcttgttggtgacaggttgtattggccagagcttaggtgataagctggtgaaaatgcctaattttaaatctcaatgggattaggagagagtttatatatcttcttatacatattaaacattatgaggacactttctattacgttttttctcaggagtgttcattacatgaccttgacattggaatgtatgaccatatttctgctcctatccccagaacatctccggagaaggagcctgctgagtcaaataatgagccagtttctgtgggttttactgccttggttcttcctctctgatcttgcctttcccactactgttcttccttctcagctattcttccagtttactcttccctccacttttgcttattaaggtgtggactttgggagtagaccgacctcagttgggatctcattcctgtgattagctctttgacgttggaaaaatcactgtccaaacctcactgtccttatctgtaacacgaggctaaatacttgtaatttatgcaaaaacaacagacacggtacctggtatgtttttattgctcagtaaattttagttaaccattagcatcattgtcatgttcatttcaaggctcatctcaaataattttttcatgatagctttaaaattttttttgtatttcaccaaggctgtggatatgatttactccatggaactcagaaatcactttatatctcctctgacatttcgtattctttgtgtgtgaatatacttgagtacatcccatagggcagtggatatcctttcttcattgctgtatcttctgcattgccttcatttaggtggtgcaaataatatgtactcaaagttgaattgagtcaaaatgagacataagggtggaggcctatcgtatatttataaagcagtccacctggttgagtgaattctcataagctggaaatataactaccctcggaatagtattcagttacttccctcgttagggtgtgtgtatgtttctcagtgtttatgtaattgaaactgtaatgcaacaacaaaaaaggagaattaaagaaataataaaaataatgcaaatgttataaaagacagtcactatcatagggtagcagtttaccagaactcagaggagaccttagtgtgatcttggtcatttatactgctgaaaaggtagctttcatatctttatgctcagctgcttgcaaggttcacaactttaggattggttctgcatgtgtaaagctatgcctgataaggcaaaagaggggtataaatgaatctcacctgaaattggagtcttgtacagtgaatgggtttacctggagttgtgttcatattgtgaacccagcttgttttaatggaggtttccattagtcttcctgcctgtgttctcagggtattataagaagcatgaagatgtgtgtgagctttctcttccttaatcacttgaaattgatcactgtctttgaataccggacccgtaaaaatacccttttaagaagtccttattttttcatttctttaattctctgccagaagtgagtggaatattgggtgtctgttttctagatccataacaccataaaatgttaaaggatgtactatgctgagaaaagtactcccattttatatttagggattatgtgatctgcccaaagtcacacagggaatcaagagtctagatctcagccgggcgtggtggctcatgcctgtaatcccagcactttgggaggccgaggcaggcagatcacctgagctcgggagttggaaccagcctggccaacatggcaaaaccccgtctctaataaaaataacgaaaattagctgggtgtggtggcggacgcttgtaatcccaatgacttgggaggctgaggcaggagaatcacttgaatccaggaggcgcaggttgcggtgagctgagatcgcgccattgcactccagcctgggcaacaagaaagaaaccccgtctcaaaaaaaaaaaaaaagaaagaaaagaaaaagagtctggatcttgtttctgctgcaacacttgactcatcaggtgtttttctgtgcttgtgctagaaaggtaggaattgtactgtatgcactggatgtggatagatatgccagctgtgggcctatgtggaggcaaaaggaggccctcatgaggacattgctgtcagcgattgtggtaactacagagaatatgctatgctttggtggtagaccagatgaatattataggactagtagagttatatgaattgggggctttgatttgaaaatctgtttaaagggaactgattgctaaaacacatttcgttgtttttcttgccttaattgccaagataagggattataggattgtgttctactgagacactttttcaaaaatttgccactaagggagttgaattcatatacaaaaaattcgttataatgtattataattgatataattttctttatttttaaattattttttattttgttgagacagggtcttgccatcttgcccaggttggagtgtaccatcatggcttactgcagccttgaactcctgggctcaagctattctcccaccttagcctcccgagtacttgagactacagagacgtgccaccacacccggctaattttattttattttttgtagagttgaggtcttgctatactgaccaggctggtcttgaactcctggcctcaagcaatccccgtccctccccaccttcctcagcctcccaaagtgttgggattataggcatgagccactgtgccagcccatatataaaataattttccatagcaagtaatttagatttggcttcagaaattttatttttttaagatttaatattataaagtaattttttagttgcaattcaatatatgctcattgaagaaaaattggaaaatacagaaaaggacaaagaagaaagtaaaagtcactcatagtggtatcttcaaaagataaccacacttaatattttggtgtttcctgtatactcacaaatttgcaattaagttgtacataatgttttataactggttttaatttaatatattattcattttctcattctaaaatgaatgcagtgttatttaaaaattgctttcaacattttcattaaaaattttcaaacatgcagcaaagttaaaattggtactgaatacccatctctccatcacctatattctaccattaatatttaccatacttgctttatcacttacctgttcatctctccaccccctctattcatccattgatccatcttgtttgtttttccgtacatttcaaagtaaatttcaatgcagtgtattatgtttaaccaagctggtttgccttcttaattgtttttggtttacaccagtatacaaaggaattcgtattctctgaggatatacaactgacagcccagggaacttgcggagagtattttgttgggtgtagtgaaaaaggacatccagggatttaaaatttgccttggaatagagttaaatgtatgcattattagcatttgagatagcacaaaagaaccattaaaaacgatcatctcctttttacctgctgttatgcctaattcagactctagcatggggacaaggaaaatctttagagggaaagaaaaagctgcagaaagaaaatcatactttctgtagctttcctcactgctagagacctcaatgcttggtaggttgtgaacatggattgacttgttggcaggaaaagcacttcagaatcgtttcctccagcctaccagtgggacagttcagtcctaaatgtcctgtggatccaggtcttgccttccctgggcaggggttgagggactgttggtctcgtctgtaacttgactcttgtttctgatgtggctagatttcccgccagtttaccgggtcttcctatgtgaatgacagattctttcctttgtattggcaatggttggtggaggatggggagtgaggtggtgggataaccttggtgggctgaggaaacccgtgcttgtatctctctaccacctccttttaaaggtgccttaaggtgcctgtcccacggggtgcggcaaggtagggtgacctcgctttatgtgcagttcccagcatagcaccttgtgtatttaggcatttagtaaatgtcccttgacaagtagactgtccctgttaaaccctcagaatccctgtagttgttctactttgccagctagcacctggtgcctttcacaaacatttcaagaacacatatccattcttcaaaccttataatcttaactgtgttttcaagtggctggaggcccttaagatagaggagcctctgtgtttttccccctttcttttcccatgtttcacattccagggtgttcagtctcagtatcacgtcaacaccattttaagtgataagacgactcagctctggctgggtgcggtggctcacgcctgtaatcccagcacttcgggaggccgaggtgggtggatcacctgaggtcaagagttcaagaccagcctgaccagtatggtgaaaccccgtctctactaaaaatacaaaaaattagtggggcacggtggctggctcctgtagtcccagctacttgggaggctgagacaggagaattgcttgaacccaggaggcggaggttgcagagagccgagattgtaccactgtactccagcctgggtgacagagcgagactccgtctcaaaaaaaacaagactcatctctgacgctggtgacaactctgacatgttctttctcgtaaactctaccttggataaagcaccttcctaggagtgggtgtctgtggagccccaactttatatgaccaaggcaaaatgatcctgttttttttttcttttgtcttcatcttttcttttttttcttttcctgagggcagttgattcttggacattttaggcagattattttgtttttggataatccatgttcttccatgtttccttcaggcagttttagttctccatgactgagctagccaggaccttaatgggtcgaaaggatgtctggttcttcctttaccccactcccctttctctttcttctttcaggcagaacccctctaactcttagagctgtggtcctcagctgagggagattttttcctctcttccctgagcctctgaaacagtttccagtgtctggagacatttttggttactgcgcctggggagatgtggggaaatgctacggccggggatgctctaaacatcttcaggacacaggacagtacctcacaacgaagaattatcctgctcaaaatgtccgtattgccaaggtggagaaacgctgttctactgatagaggtgctctgttgaaagtcttcctgtcaatagcattctgtaacctccatggcagcattgcactcatcagtatatctgacttgagtcctgcatgcttccgtttgttgctcttaagggcaaatggaaatgcacacttaccatactctgcatatgatcatactctcccagcttcgtctcagttcacttttaaaatttattgttttacagcctctttactctctttttttttttaatctctctagatgtttcccagattcttcacatattatgtttctgaagttgtagtgatccaatccaggcacagcattctagcagtttggtcgctgctgcaaatgagggaagtcgttatctttgggctggggttggacagagcatcatgaccaaccatctgtaaatgaccacttggaaagcaagaagcagttatgtctcctgcttgttagagggagtcatgtggaagtaaaactttttcatgtcagagagacctggaaacaaatctttcttctgccacttaagaaaagtgtgactttgggccttagttttctcagacataaaatggggttaaaatacttcatagggttgtcaggagtataaagtgaatgtgtctgtactaacaataagtagcacgtgtaagaagggactttgtgttttactgtactgtagccatgatttctgttggagaaaatagaactctgggaaatataaaagtatagtttgaatttgatgatggtttttcaaatgttactgtgcagaagagttcctgggagcttgttatacttgtatgtcctcaggttgcatccctagacattctgtttaggaagtttggctgagtctgggaatttgtctttgtcacagtaacccagttggttctgatgcaggtggtccacagataacacttggagaaatcctggccttatggcaaccaggtgagcatgtagcgggggcggggggcccaaacttctcaggaagccccagctctggctcgttgttttctgtttctctgggctcactgacagagaataatctttcagagctctttcaagcaggacaaagctgttctttgttcttgcttttaatgacaactagagatatctttttattggattgtctccttcaacattattttgactcagtgtcctaagaagtcttttgggaaccagcttaggaactcagggtagagaaatctccttgttcattggctgagggaattgtgacttggggtgaggaagggcagattagaaggggggtggttttgattctcagtgggtcttggaagggtttgggaaccagaagtgaaacatggacaggatccctcctagctctaaactgaattcctttaggaatgggatgaaaaatggccgcattccttctactcgtaaattatttgtgtctagtttatctcttctttcattgaattatgcctggcaatctataatattgactgctttgtgattttaaggagtttctttttgcagctgtggtttgaggggtgtgaggccggctcactgacccatgatggccagagcttgctagctcctgaaatgaatgtttgtaatttcctgacatagggacaaaataaatggcccaggcctgcccataaatatgcatcagtgcttctctatgctgggtctgcgtgtgttctcagaggtctttttctgtgggacatgctctacccacacctttctgccagacacagtgtctcactgccagctatggtttggcctctgcagcgtgggctgcgaatttaaatatttaaaaagaaaatctcggaaggaatgtcccatcatatacttaataaatgaaagtgtgaggcagaaattaaaagtccactggggagtgtagttggaaaatgtaaaccatatgagatgtgcctttaagtttgaactccttgttggcaattttctgccatgagaacttcctttaaagtcctgtcggttgaatttaatgagttctaagctgtgaatgtaaaccttagatgaaaaatgtgaacccaagagctaggttgttctgggttgctgatttttccacccctgcatttaagatgtctgtcaaataagtcttaatgtacctgagttaataataggagagtgttctgtctgatgatgatgggcccctgagcccattggcaggtggacatttctgtggatttcataaaaataaaactaaagaccatataattctttataaactgaaacaaaaataaaaggtaaacatgtaatggttaaatggtagtgaaaaatgagaacgtgtttaacagaatagatttttaagttcccattttattttattttattttattttattttatttttatgttttgagacagagtcttgctctgttttccgggctggagtacagtggtatgatcttggctcactgcaacctctgcctcctgggttcaaatgattctggtgcctcagcctcccaagtagctggggttacaggcgcatgccaccacacctggctaattttttattttttttttgtatttttagtagagatggggtttcaccatgctgggcaggctggtcttgaactcctggtttcaagcaatccacctgcctcagcctcccaaagtgccgggattacagttgtgagtcaccatgcccagcttaagtttcaattttaactggtggtttccttggaatatgcttcttttagggttgagagtgaagtaagatagtagtttggcatgtatgtgtcttgtaagtttaacatgtgctgatccctaaggctaatttcatggcatttaatatttccatggatgtttttgtctaatcacttgtagcctttcccacttctcatgtgttttgatgtataggttttgatgcatagattttaaaagttcatgaaaatgttactttaatgttcaagagagagatgaaggtgaatggaaaacggaacattattttgttggccctatttggtcgttctggttgttgctggagaatgtgagagattgtgattcaggtcagatactatcttgaaatcaaatatgagttccagatactcttatagcccagatatttccaaggctttgctgacagcttaattatttcaagcaatatttgatatggctgaagacctgttgtccaaagaatttggatgtccttttgggctcttttttcaatgtaagccttgccaaaagatgtgaaaatctgcatgatataaatgttaaaatatggccaggcacggtggctcacgcctgtaatcccagcactttgggaggccgaggtgggcggatcacaaggtcaggagtttgagaccagcctgatcaacatggtgaaaccccatctctactaaaaacacaaaaattatctgggcatggtggcgtgtacctgtaatcccagctactcggcagaatcgcttgaacctgggaggcaaaggttgcagtgagccgagatcgtgccactgcactccagtctcggcaacagagcgagactctgtctaaaaaaaaaaaaaaagttaaaatgcaggattaccatttccttttacaaagtaatttatcatggaattccttgaagtggcacttcttcatttgtggctgtgaaatacaatacaattttgcaaaacggaacgattttcccagttttccaggatggagtccagtttctcctgtgatggtgtctgatctgtagatagccacttctttttcttcttcagatgttctcctaaaaggttgggactcacaagttaaggttagcaaataaaaacagggaagaggtgacgtgctgctccagggctgtttgagagttttcatagagaggctgctgctggctttcttttgaagctgagagcaaacctcagtggttttaactcatgtccaccgaatggtgtaaccccctaagtatcagggtataaggaatataggatttttcttttaaacattgcctgaagcctgaagtccctgaagtttcccccgccccctgctacttttagcattgcccaaaatatgatgccatagcaaagaatctggagacatcagggaaactagcaattgcataagcatatgaaacttttttagatgtgcattgaggagttagcaagccttaaatgaaagacacctttagaatacagtatagtaatctctctccctgtaacatttatctgtatgttatagatacagttctaaatttactcaaacatgtttaaatatagtaaactgttttaatgtaaaactatccttaaaacattcagagagttgtctcttgaagtgtttcatctgtgaactcttgccaatagcacttagccacctagtgaacgctgagtcttcggtgaagttacagtgccagtgagtgcgatgtgctaagtccgtatttgatttgccagtgaggacaaatgcacacactctggtttagatcagattcagatgatttcctactgtgctttgtgagtcattctagtatcatcggtaaataattcctaaatgaaatctatgtatttcttttttacttacttggtttgggaagtcattgacaggtgaatgattttataagcaatgtaatgagttgccaaatacagcaacttttcaagacacttgaagcttacaaacttgacattgttttagctttaatttacaccaaagttgggttatccctttgaaattattacacgacactgagataaaggagaattcaagtgctcagtcttagggctaaaggcaatagtttatggttcaataacatgttgggatgttgtaccacaattaatgtaattattaataggttttagaaacatgaaaagtgtttgggatctaattctcagtgacaatagcagaattgaaagtcataattattgtggctataaatgtgagtacattcatgtgcgtgtgtgtgtgagtaaagattgcaatggaatatgcatcatgaaaatagttgtgtttgggcaatgggatttctaatacactttttgtcattgttgtttagtatggttttatttttactttttttttttttttgagaccgagtttcgttctttttgcccaggctggagtgcaatggcacagtctcggctcactgcaccctctacctcctgggttcaagtgattctcctgcctcagcctcccaagtagatgggattacaggcacccaccaccatgcctggctaatttttttgtatttttagtagagatggggtttcaccatgttggccagggtggtctcaaactcctgacctcaggtgatccggccacctcagcctcccaaagtgctgggattataggcgtgagccattgcacccggccagtatggtttaattttaaggaacaagttaattatttcttttaagcctttacaaggaaaagagttgaatggaaagaatacctacaaatactggatatttacatatatattttttagttatacgtaacatttctttataggagggcagtacacatgaatacccatttgtaagatatgattggacagttctttccccctgaaatatctcttgaacacgggaagcacatccccttctcggtttttattgttccttcccctgcatcctcacctttccttgttcctgatgttggaggttcattgaacaatatgtggcagcccaaggctttcaaattgacatctggagcatgcagaacatattctggtggatgggccagcgttggcagggttttgggatggatgaagagagaatcaaggccgttcattataaaatggagtgatgattatagtagaggcgattacatatttagtttcagtacctaaatgtctcctcctttgcatttaacttccaatctatcagcaagtcctgtggctctacgtccaaatatattctcaaatccagccactttacttttcttcttctctactttgtctaccctagcacttgccatcgttgattcatgcccgcacatctacagcaacaccctaaccaaccaggctgtacctgctcttgccctgcgtacaatcttatctacacatagcagccagagtgacctttgtacaatgtaagccagattctgtaattctttttttcaaaatcctttcaagtactcaccttggtctacaggactctttccctgtgtttagtctcctgccaacctgccctaccacctctttccacctgcctcttagctgacaagcaccagccacaccgcctctgtctttgtcccttgagctctccaaaatcattcctatctgaggccttttgcccattctgcccttcatcttagaatgctcagatctttgcatggtcagccccttcttgtcagcccacatgtcaccacctgagagaggcttctctgaccaccatagctcaagtattgtccccaccaattttatttttgtcatagcacttaactgcaatctgaaattatttatattacccttttgtttttgagacagagtcttgctctggagtgcagtggcatgatcacaggtcactgcaacctctgcctcccaggttcaagcaattcttctgcctcagcctcccgagtagctgggattacaggcatccgccctgctaattttttgtatttttagtagagatggtgtttcaccatgttggccagcctggtcttgaactcctgacctcaggtgattcacctgccttggcctcccaaagtgttgggattacaggcgtgagccaccacacccagccatttatgatacttttaaatccatatcccctctcacataaaatgtaaactctaggaaggcagatactttttgctctgagcttcctttctaccaccctaaatagcacatggcacatactagaagctcagtgaaatatgttcaatgaataaacaagtacatattcttcattattgtataagatgtaaattgaggtgatcatgtaaaccataaattgaggttctttgcaactccaagatgctattattcttagtgtgaggaaggcattattataattattacacataatcagtagatcatatgtgtttgataacttcttcccactccattcccatttatagtggtagaattcctttcttttccttttgaaatggagttttgctcttgtagcccaggctggagtgcaatggcacgatcttggcccactgcaatctccacctcccaggttcaagcaattctcctgcctcagcctcctgagtagctgggattacaggtgcccgccaccacgcccatctaattttttgatttttagtagagatggggttttgccgtgttggccaggctggtcttgaactcttgacctcagatgatctaccgacctaggcctcccaaagtgctgagattacaggcgtgagccacctcgcgcagccaatagtggtggaattcttacactcatccattcattttgttcttgttactctaactggatggacttaagtattatctttggcatgtaacaaagtgcagctaattgacacatcaggagactgaatctgaatcttgggcttttacagagattgaatctgaattttgggcttttacaggattttcattcacatactgtagctagtaggctacagcttagagttgaaactgaaaagcatggccaccgaccagactttattaaattatgtgcaggagaattatcttggcagcaaatgaggcaaatcaatggtaggtaactgtcttttggtggttttgttttgagacatggtcttgctctgttgcccaggctggagtgcagtagtgccatcgtggctcactgcaacctcaacttcctctgctcaagcgatcttcccaccacagccttccaagtagctaggactacaggtatgtgccaccatgcctggctaatttttaaaaaaatttttgtagggacggggtctcattttgttgcccaggttatgtcttctgagagcttagagttcaaggtagaaacgttagttacaaaaacttgacaacgaggatgtaaaagtgaatacttcctatcatttgagtaaatgaaagagagaggaaataaagttcatctgtgaaaatgtcaatttaacaagtacttatcaatctaatcagcctagctgttaaaaaaaatgtaaatgtgtgactgtaagtcatattgaaactcatgctatcctaagcagctctccatctgcttctagttagagatgtgtcatacatctggggacctgggcctcaggctgtgagaaagtagtttcaattaaaaaaaaatcaatacttgtaatggttttctttcttataatatcatacccagtaacttgtataggttgaatttagacatagcgttataaagtttatttaatgtgagtatgactggaggctcaacataagttgaataacagcagatgcaatcagctggctgttcagctttgtttatatctttacccataatgtttgaggtatcatgttttctggattaataaaataaatttccagataaataaagtccaacttaatttcaatcctaggtgctggaaataattctgaaatttaattatgccttttgtactaatttctactaaggcaggcattgtcttcatctttcatttgtagtgaatttctgaaaaacccacccaaaaaatcaaataataaacttacatgttatgagatagagggaatgttgaatcttcatttttgtttttattttactttaattaattaatttattttgagacagagtctcgctctgttgcccaggctggagtgcagtggcgtgatcttggctcactgcaacctctgccacccaagttcaagctatcctcccacctctgccttccgagtagctgagactacatgcctgcaccaccatgcccagctaatttttatttttattttttaaatagagaaggggtttcgctgtattggccaggctggtcttgaactcctgacctcaagtgatctgcctatgtcggcctcccaaagtgctgggattacaggcatgagtcaccatgctaggccaaatcttcatttttgaatagcccgatacacatacatttctgaattattattctttggagtggatctgctccttctggatgcttgcaggcgggcgagacccttcccaggctggcacctcttgtccctgacgccgaggcatctgcttttccatgcttcaggcctcctttccagttccttccatgggggcctaaactcgattcccttattaggaggtgggtacctggccccttcggggataatttagggaagttatgccacctctgtggtagcaactgaaaatgtggcccatggaccagcagcatcacatcacctgggagcttgagaaatgtagaactcacccctgtcccatactaactaaataagcagcaacgttttcacagcacacccaggtgaccccttatgttgtctccacatctttcaatacaacacagtcctaacaccttagcccccagccccaagactaaaggagggaacattctcctgatgtcctgccaggctccgactcatggtattgtgggatctgcaggtggcctcacttaggagaaactctgggctggggctgctggaggcagagactgcagcatgctgctgcttccaccggggcttagcaggtgttccgtgcccttcatgagggtgtgtcttaattttccttctcactcaatgatgttctcagggccccctggggttgccaagacactacttttcactgcactggacatttgtgttcctgcagttcatatcctcttcccttgtggctcttattttctgccatcatttcagactatggcatcatgcccctgcttctgggtgagagtgtgtgaagaggggggggaagaaagacttctaccatgcagagggtgacctgacttcctgtattgcggttgtaacttaggggagggcctcaggttgtcagaggagacaggaaaagcaggagttgggttataagtgcaatcagatcagatggagaggtggcattaaagtgaatggattttcttttcctgtgtctgtgagtaggagaaatgttttagttacttgctgcatcatggatgtggtagccagggctgtttaattacctgagaagtggggctaattgtatcttgaacagtgagtcactttcctggcataattttctctgtgcccaatcattaccatataaaagttgtcagtgctggccctcaggagtgggatttgaagagggggagttaataggaagctggcaggagctggggctgagtgggagcagagctgatcatagggaggtggggataagtaggcattttctcaaaaggttgtagtggacctggttctagtttctatccaggtgtctgggataatcatgtggatactattaaccccaacagtcaacattcttaaacacttcagtgctagacatgtacatttatattattatgtttacatgtatagtctcatttaatatttacagccctcctgtgaggtagatgctattgtcatttgctttttgtagttgagcaatgtgcagcacaaagcacacaggcagcttgcccaaggtcacatagcttggggctgtgtgaccccagaccctccgtcataaccatcactcaatccagaggaagtagattggggtggaatggggcggggtttggaagtacagagcgaacatttggaaagtgttagatattaaaaaggatcattttaggaattgtgttggaaaacagagtgaaatgagaattttttttaaaagcctggctattgttaatggagcttggaaaagccccagcctcgttttggagctggtggaggtcacactcccttggctccttattaagtgatttcctctaagctccagatagaccttcctagaatctgcttgtggtgttgggttggtagtcagcagacctccttccatgttccttctttgcctgctgtttccctgttaagctgtgctaatgggggcaccaggggaattttggaaggctgtgggagggagaagggacacgcttcatcctgttactgttcttgtcagcttagcttcggaaagggtctttccctctgccagcagtaattggtttccatttccagtttccttctacctcttggaaccagccttctgccaccccctgagatgccatcccagtcccatgtagaccttcagaaagggctcctcttcagaggtcagggtcccagccctgtaggtttcctcctaaatgtgtagagtctaataaccaccacctcctccctttgattcctacagtcctacccaaggagtggtagctgcttcctacagcttcctgagtaactctgtgttaactcagtcttttccattctctagcacctgttgaataagatcttcgtattaaataatatgtcgcattacatagtattgcttccattttcctaatagcccctgactgattaatttccccaagccctagaatcctggcagaggtgtggcgagagaagctgatacgcaggagggaaccatggttctcaaatctaaggatatgggtgaattgctggagaagctaattaaaaatgcagatcccaggcctccagttgcaataattgtgattcagtaggttggatatagggttaagaatctgctttttaaacagacatcttaggtgtggctgatgtgtagttatcctcttcctgaggctttgaaaaaatctgcccaaatccagggccttcccatggggttatttcttgactctggagttgttgtactggggcttagacaccaattttaattttttttttaatagggcgtgggctgtggatatgctaataacctttgattgaagaccaccaaggttgtatattgcccctggaggctgaaaatccaacccttgtttagcccacaagctctgatgcaattagctgggagaaaagagcttttccccctaactgggtattgtccgcatgtcaggccctgcactccgttgtgtccagtcagagggattcctttttcttatttatgcaaagccaacgtgcctatagctgcaaagaagggatggagtgggactgacctggaagtagggactggctcttctttttgcatatagagcccttcccatttacaggtggcttgaggttgaagcagtaaggaatcagaagccaccaccacagcatacatattcaaaccaggacacttgtaccttttggccttgccagtgggtgtatccgtttatctgtgtgaatagcaatagacatttctttgtggaatgtttggcttccatttggttgatttaatcagtaaaacaagtgggttttgctgggaggaggtggattatcccttccaagcagaacaggaagtttttcaatattgccagatcgttggactttgagtttgcaaggggcaaggacttcaaagtgaccgtttactgactataaaagtcagattttctcagtaggagtgtgtccagcctacagtctagtgcctgatgcagtgttccctgacatggatttcgagggctgttgtgggctcttgtctgtccttcatgttgttgtttagtgttttatatcatctctctatgctcacatagaattattgaagtccctagtttatattagcctgccacatttcgtgtggccctacatgctgagcaggggccagtggattcagtttttaaaaattgaaattcggatggaacattgctcttcagaatgagctctcctatgagacctgactttagaattgaactggatgttctgcaaatcagaaatgcctgaaggcagagagcttccctaggcttgtaccttgaagttaactgccacatcccccacagcgacctacttagagataacacattgaataaaagtgctcttccccttgctttaggttatatagcccaccagtgcctgctctcctctgtgtagacccaacttggagcacacttcatctgccttgtctgcgggtgtcttccccagtgatgggctgatgtgcattccattcacttagccaacactcttggaggcctcctgtgttccaggcagtggtctaggtggaagggctgattctaggaataataaggccggaggagaccgctccacaagcatagaagttctaggatgaagtaggtagagagtccctgcctgggaatggtgaggaagtgactaattctccttggagttgttcaagaaggcaacatctcaagtgattcattcatagctcgggcgggctaggttgtcctctcttctccctatactccccatcaaaatgaagtaatctttttcttagaaggtaaacagcttcactggcagaaaggttatgtgttttactccaggttgcatgttcgtcagtatcaatattaggactaaaatcctacaatagagttttagctttgaggggctgaacctctgagtaagtgctcttgagactaatgttaaatgtttttgtttttaaaccggcaagcaatcatattcccagagtgatttttaaaaaaatctattgtgtttcattaagaaaacaaaaatgcctagaagtaaattccaatattaatcacgttgaattagatggaaattagagtctgttcttttttagctccttatctcacacatgcaactcatctggtggctggcttgaatttacctagactccctaataataattttcattatcattgaaagttattacaatttgtaaattattgaatttctttatattaggtatcccaatccacatactttctgcatgttcagtaagtgtactcactgtagggttttttggttttttttttttagttgttgcttgagatgtagcttgtggtccaaggtgagtttatttacatttgttctggtttgattcctctatctcttttaaaatcagaaccgaggactactttttatttttctgtggtattatcagatggttcttgatgagttatatacaagggctgcttgtcttcagtgaggtctgagacctctaaatgttttaacaggctttctcaggtaagatagtttatccaggtcagtggtgaaacataagtacatttcactgagtggccattaatccacctcatcctactgtttgctttttatgttttattttattttatttttttggtaagctctaaatcttttccagcaaccctggaaggaggctctactaacttgttcttttgacggaggcagaaggacaaaactcagtcagcttggtggtgacacaagccaggtcacttaggagggtcaccagtttgtagctgccttgagaaacatggtcttgctgcactgggctcagtggaggcgagcggtttgtgcactgttatccagacaggccagcaggagcgtctgttttataaattaatgcgtagggcaagttgtgtgtgtctcaccgttactgttctttgtctttgacttgagattgcactgtgcacatgttcctgccacatagaatgcaccagatgacagaagagtcgctgtgataaggttttctttctgtgtgaaatagtaagacgaggaggatggtgacatgtagcagatcagtttgggtcaatgtgccgagtacatgctcatactatgttgaaccatatgacatgaacatttttgatgtagaaaaatggcaatttcacacttgcaatctaataacttaaaattgggaccatcaagtaaggaagggtgtacctttgaaggcgaatagcagtaacacactcaggcaaaataacagtctgtggtgaacttttattagactcacaatgcttttataattaaaaaattaatcgtcaaccttattgtattaggagatgtcacacagaattctggattttcagcctttctgcaaaattctgactgtcttgctatgccaggtcagcgatctcagatggtgacagttggctgaagcagagtggcacttgtactcctgtagagctcacatgtgtgtccattcatccaagtcctctcctggccagcttctggtcctcatgtgactgactggcctgtgggctttgaggttggacacatgatataaatagagctcaaagagtaagctggggaaaggcaggattagaataaatcagctgaaccaaagccatttgttttgtttactatccatcaccagctagcacctctaaaaagaaagcctgagcccactcttgactctgttcactggcaaaggacagctgagcatacttaaggagttcttgcacgtgctaagagatggtcaaactcttattaaagttccaactttgtgcttctcatttaaatataatatggtgattagaacttccttccaggggccataactaatgttacaggctaatgtgatgccttgaaaaaaatcttgccatttatgggaaggggttactggacaattgacgtcttaactttaacgtaaagttcttatggactaatttttttaaaaaaagtactagatgtttattgctacattgttcatatggggatgaaaactagaaataaaggggatactcatcaacagaaggagggctgaataaattatggtacattaatactatgaaatattacgtggtattaaaatgacagattgacaggacaccagttgacctggggggatttccctaaggagcaacgctagctaagatttaattagtgcttactatgtgctaggcacagtttcaaagactttttttgtgttaactcatttaatcctcacaaccactctatgagtgaagtagcattattgccgtcttaccaatgaggaaactgaggcatgaagaagttaggcaagtcatccaagcataagcagttagtatgtggcaggtctgggatatgaacccatgcaatctggattgacatagatattttaaaataacttttttttttttttgagatggagtctcactctgtcacccaggctggagtgcagtggcatgatctcagctcactgcagcctctaccttccgggttcaagtgattctcccacctcaccctcctgagtagctgggattacaggtatgcaccaccatgcctggctaatttttgtatttttagtagagacggggtttcaccatgctggtcaggctggtctcaaattcctgaccttgtgatccacctgccttggcctcccaaagtgctgggattacaggcgtgagccaccatgcccggccttaaaataactttttaaggttagatatcaaagtgcattatacatgacaatctttgctatggaatattaattcacagctgtttctgaattggattgtctcttatattttaaactcttatgctcatcatgctgtatcagactttagaaatcatttagttctttggtttccaaatttagctctcctagcctctcttttaaaccagtctaatcttcctggtgctaagcaaaatgaaactcagttctgaccctgagccactttgccctcttttcccttgggtgccatataaacagtagatatagtttacctcctttatgtcacagatggagaaatgagtcccagagagagagcctaacatttattgagttgatgttttccagggatgtgaaatatattatgttatgaagccttaaaggtgtattttattatgcccattaaggaagctgaagtctagatagcagttaggtcgaaagtcacagagggaatcaataccacgtttggatagaatccctgtctaaccttcttttcaaggctcctactaacctaagatgggaactacaatgagctaccagaggcctttcagttgaatcttgccatttgctgttgacttaatcaggaagcttctaagaacttctaattagtatggcattctctgccataggtgttagtggaagaatgactttgaacagacatttcaaggcttttgtattagtctgcttgggctgttgtaacaaaataccatatactgagtggcttaaacaacagaaatgtatttctcacagttctggagtctaggaagtccagatcaatgtgctgaccacttcagtttctggtgggctctcttgctggcttgtaaacaggcaccttcttgctgtgtcctcataggacagagagggaaagtaagctctctattgtctctttttgtaaggatactaatcctattggaccagggctctgtcctgatgacctcatttaacctttaattacctccataaaggtggtaattatctgttaactgtatctctaaatatagtcacattggggattagggcttcaacaaagacattttaggggaacacagacattcagtccacaacagcattttagtcatccctgttaacttctgcagaggaagtgatcctatagaaggatttattccacttgaagcaggaatggtcacctttggcactttattatctagtgaactgcctgctacatggcagggatttaattactgtttgttgatgaattaatataagcaaatatctttttgctgcttttttgcactaaatgcactaaatgcaaagaggaagttattgtgtgagtcatgggagtagggactttgaacatactgttgaaactgcatttgacaatagtagtgatttttgcaaaataaacactgtagtttttcatgttaatttcacatagaccttagtgaaatgcaaagttagaatactaaattatatttccatgaaatatttctttggataactgaaagtataaaatgcaggtatgcagtgttctggttatttaccttaataccagcagcagtacagaggggaaaatgagaagaggtgtcaactaaaggaaaaatctgcatcatggtaatgaacgtgagcaatctcttacctctgattgccattgacataatcactatctaaaacttccaagtagctgttcttagtcgggaattacttagcaaaagtgaattgagatagagtgacttaaaagagtgaactgaaaagatttaaagccgtgcccacttaacttgtgcatatgtgcatacaggccataatcctattgaatgatttattgcacttgaaataggagtcaggaataaaatgagaaattcataaaatgttaagaactcttattccaaaaggggtgcatgatacttcattgaaaatatgctactaatgttaatgagtcatgtgtcagtatcatatattgttcaaaataaatacaaggtgctgttcagcatagtaattgctcttattttatttcatgttgctaacacttgtccagttcctgtatttacaagccccacattttttagcttcctcttaaactaatcagcaaagtgcataaaaacccttaaagcaagacagtgttggtattatttctaaatgtcctttagaattatgcagttaggtcacctcctttcctttcaaagcatggatttactctaatcctgggaatcctaatctagtactagcagactccaaacttttgatcatcacttacagtaaaacatgtcatactaaagcttgggcgtaagtgaaacaaaagtttcataaagcagtttttacccttattacattctgatgcttcccttaaacaatgctggcctccacccagttagttgattttgtgaccagtggatcctcactggcaatttgaaaaaacaccaacctggtgcacagaatggtagataaggaataagtatgcctagggtcctaatcctgtgctttccaattgctgcaggaaacacatccctatccttcacaggaccctgttttctcattcataaagtgagggggtgggttggacttgatgctctctaaggtgcctttccacctttaactttgttcttggtctcttctatagttgaagggaaatctttggatttagagtagaatctcccaaactgtttaatgaatggttaaatccatccatgttgtgacaatgatctcaggtcacaaagcttcataattctgtctagagatgagaagtagccagtcgttccttagttagctgtagttgtaaagcagtaacaattctctagctgtaaagctttaataaaagatttttctcaccacctacccctccatgtttttagaattcttattttttgttccttggaggttaggagacttttactgtcaaggacttaactatgagaggtatctctgtattacatacgcttgttttgtcctttctgggaattaatttattctttcctgtttttgaaactccttgatttgtgaatgttctggaatgtagattaaggatggagaagctgagctggggggagatttattgcaggtagagctgaggatggtttcccaccagcagctaaagatgttagttgatttctctgctgggtaccaggcccagtgctaaccagctgcatagcactttctctgtggctcccttcagtgatagtgtcttgttccggagactggaaaatatactttgctatcagcagactttttgtattgtttggctctgccatctggaccattctggattgaacccagtgggctgtgatctgcagggccagtgaagccaaactagtgggacctggagtagcagccaatggggtagcagctgatggatgagcagtgagattagggagaggaaggccctttgaagcaacctgtccatagcactctcttcccaaacagctctagcaaatgaggctcatgcagaccctggtctgggttgtttgtcttctgttgaaccatataggatggaagaaagttttttcctagcaaggccaaaacaagtgaggaagggaagcatgtgctctggcttgtgggaagtagaacaaaagcacacatctcggagtctggcaggcgtgatgctgatactggctcaggtacttattagctctatgtgaccttgggcaagttttctgagtcccggttttctcccatgtaaaatgaggctagtaataaaaatgtacaggctcataaggagtcaagtgtctactgtgcagtgggtggtcagtatgtgtgtgtggattttctttcccagtgaacacaaattgggcttccctggaatggtagtctttaagttggagacctgggtttggaggagtagggtgatctgctggggttgccaagtcgggggccaaacctgatgatgaggccacagggcggaagaaagggcagagcttcacccctgtaaacacccatttgggcccttccttggggtgggaaagccctgattcgcactagaaatgtcatgcctttctatcacataaattaggaaggctaatactgatctctcttgttgccaaatactcccctgctttcccttttatgatgctatttgatgaatcatttgagaagtattacctgaagaaaaactttagggagaaagattgtcacctctgaccacctttgcacaatcctgagtgcaggctgtttctgttgttggctatcttgcagtggtagaggatttatgtgatgagaatggcagttttggtgttatttgcagaattgagatgccttaacctgaaaacctttttgcccctatggagtataaagccgattaggagttcttttgtgctctgccgcaaatcattacatgtctacattttgctcttataaaatatggataatgacatgactctgtctcttaggagtctgagtgcattagctaatgatcatgaaaccttagaaatagaaaatttatatgaatgtcaagagcttttgtaattacacatttgcatcattttgcttggcatccttgaaagttgtgctttcaacatgagaatactagggttgattcttgtttttctcattgtggagcaagctctgaagaaataagcccaaagagtgttcaaacatcaattatctcagcttctcatgaaagccttgaagtagcttagaccagagtggtttggtttgggctgaggtggaagaagagcttgagatattttaaaggcactcaagctagaaaataccaggaactgaggatggaaatggctttcatgcaaggttgtatgtagatgctcatgtcccttgtcccctgtgtcctcagacatacattgtctggaaaatgcagttttttttttctcctccagataattattttaggatttaagaaactctttaaaaaaaagatgtcaaatggtaatgttctgaatacgctgagtagaagagtttaaaaaaattgatctttaggaaaatagttacagatagtaacctcacagtgtgccatttgatcgctgatgttgtttttatttcattgcaggcagtggagctactgctgtggttcaggcagccctatgcaaacccaggcaagaacgtgtagcaataaaacggatcaacttggaaaaatgccagaccagtatggatgaactattagtaagtaacagtgcagggaatacctgctggttgcttttcttaatctatgggtatatggggatggttgggagaagagcaaggtgttatctccagttttgacatatgcatttcttggaaagcagcccctaccacttcctgctccccagattaatgggactgtaccttatgattgtgttgtataatgaacaccttcccttgctttgagaaacagtattttgctcagttcgaataatcccaaggtgagaatggcctcagcgttggcactccacttgctgtatcaagggcacacactgtggcgtgacctaacatgacaggattactgactgcagttttggatggtgagcttctggccctccatctagaatgtgtgacacaaatggaagttgtcccccaaactatttgttggtcattttagctttcataaattatagcatcacacaaatttgagttattttttttttaaatgctctgtagcttgcatttggctaatgagaggagtttgtttttcttaacgtggcaatttgtacttcttattctaaatgagtactttatataaataattggagcttgtcagtgtggatatgactatagtagcaatggttggttgaaggaacatttgcttttggcttagctgactcattattaaatgaacagcttggcaaatggttattagttgcccggcaaactgtgaagggtttgagggtttaatctcataaatatcgttgttgttctaccggccaattttctttttttcccttttggccatttatttgaggataatagaaaactgcagtggaggagttaactgattggttatccccacactaatcccagtacaaatattagtccagtagctccatacaagctacaaagtataatgacagttggctgcaaatgaagaagccttttgttacagtctacattgagaatggaatgtcattaacaacagctttttgtctttactcagaatatagcttttattttaggcttaattacagtacactatagtataaattaagtacaaggataaagctgtacttttccagatctgtttggccttacattttaaattaggctacacaatgcatagatttcattgggttttattgaagcaatggattgccggctaaaactcagaagagaaccagggcttccacaatttaatgttaatttttgaaatttgcatacattcaaggcttttaacggccttgaaatttcagctgtgctttgctcttactgaaattcctgctgcatgctacttgtctgttgcttgctatcttagtgaccagtaatattgtgcctttgtcacccaaccagttttcaaggtcactttctctgagttggaaaacgcattttataaactgtggggagagttgggtcctgcttctgccactaaacttgttttcactttagtagagttacacaacagctctgcgcgatttaaaaagagttgaattggaagttttcttctaagatccctttaggaatcctgaaattctgtggctatgcataagtgtactttaacatttaaaaaaaaaatttggagtgtgcatttaaatatatgtactgtttggatgtatcactcaagaatttgccagtgatagttgtgtttttgttttttgtatttttttgagacagagtctcactctgttgcccaggctggggtgtagcagtgtggttttggctcactgcaacctccgcctcctgggttcaagcgattctcctgctttagcctcccgagtagctgggattacagacatgcaccaccacgcccggctaatttttgtatttttagtagagacagagtttcgccatgttggccaggctggtctcgaacccctgacctcaggtgatctgtccgcctcggcctcccacagtgctgggattacagatgtgagccaccgcacctggctgatacttgtgtttgattgtggtattctgttagaggtctcagccattttttttgccattagcagaatattgatacagaatatgtgtaaggcttgcgtgtacttgtgcctgacagttctggagcctgccttctggtttgatgctatggtctctggtttctaccaagccctcagttgcccacagccttcacgtttccctctgctagcgtttcctccacagtgtccagtgatggtaaccgtgtaagcttctgggtggaggtcagcagggaggctggtcattctggtttctttcctttgttttcctggaaccagtaagcatagcagtgtcatttggagctacttgtaacttaggtagagctgtctatctaaggactggtgcttttgtggctttgtgctttgctccattcgtctgaggtcttaggatttatgagtttgcttatgaggagttaatttattttctcattcttattttctttccttaatgcccgtgttgcaatagagtataatatatttgcattatttatttttcattttatattgatttattgctttgatgtttccttacccttgaatctttgaccttttggtgtgttgatatatttagagaggggggaaatggctatggttctttaggatgtacaactcccaggtcgttttcaaacaaaaataaatagaatttacagagtatagcctgcctgatttgccaggcttctgtggcccagttattggcacatgagatcgtgtggagcacagttgctgtcatcttttcaatgtctaatactgctgttgcttgcacttttattatttcagagggctcacattttggcagtgtttggacatctggtatcctaataatcctttaattccatgagtgtgtattatatacaggtcagtgcactgcatcgtctcacagactgtgccatgtgttaactggaaaccattgttcctagaagaaacaatggccactgggatctcttcttgtgagagtgttatgtcatagaaatcacaattatcaactatttgttggccactgggacatgtttctcccttgatgaaactgtaacacctcctgaccccgactcccagctcagcccccactgactacctatccccgtcctgtccccactccctttgtcccataataaagggggatttacacacacaggtcagaattgatggcacacaacagttttaggcaactggtccagaactcgacttctttatgtggtaggggctgtcagttgagtttcctgtaggtcacagagctggatccagggtttgctgaagaaggagtcaagcagtcatcatttctgaagggaagtgctaattacagtgtcagcttctttgtgaatgaggagaggaaaagaagtgttagatgagctcattggtgctaaataattgatgattcagatttatactgttgaaatgagtactgtaatattctgtaaagataagttagttacagatcaaataggcatttatttatttatttggtaaatacttactgagtttctgtattatgcttaagcccatcaaaaggatgacttttgggtgtgtatatgagagtacaaggctttatgcccactaaaaattcattttagtttaacagcaattagattagaacactcccaaataaatgtttttcttggtatgatatgaatagcaattaatctaatccttttttatttattcttttgaattttcatgtatgttttggagtttggccttttaactgtactctgatctctgaaggtataatgatcttagtgtttagttttccaggagccaaggatatgttctggtttgttctgtattccttactgtgccaacatagatgctttggtaatttctgaaatttgttaaccccacatttgttgttaactgcacatttgtcaagcccatcatggtgtaaatgactaattataactagtttaatgctctctaggagatacttacagttttagagcagaacttgttaacaccagaattatcaaacccccttagatgctaggcactgactttggtgatgggaaaacagaatggattccta[450 bp omitted]tatttaccctaaccccactttttgtgatgttcaggttactctactttattcagggattgatgaacattttggttcatcaccttatttgactttatgacttttagactttaaatagatccctttcaattttttcctattgcctcaagttctcatatttctagtctgcctttggtacccattcacagaaaattcagcctcatttgctcattcctacacatacatcaatgccatcaaaatttacagtttaattctcaggggcaggagagtcataggagaaatcatggcccggggacgaggcaaagcatttgtgtcattaaaaaaatgaaagaaataattaagtgattacgttatgaaattatggaatgctcattccataatttccatatgtgaattccatatgtgaacaaagtcatttcaagaaaaccatggctataaaaaagtgatgaatgttgatcctttgatagaaggaaaggaactccctgggtcaggggacttgctttctttgcttgactcccctacagaactgctcattctggaaaaatcagtttcaccactggtccttatttgtgtgatgacaaattctggcaaaattttatttttattacccaagtgctatgaatctatgtatttaaaagtatattaacaaaacccccttttcaattcacttaaataaaaatactaattactagcaaatcatgcatggtaattcaggatagagtcaagtcactttagcattacggtatgatagcagaaatctactgtaaattcatagatttgggtacacagtgtatcatttttttctcctatgaacataatgaaagagtttctctgtcattcagtagtcttcaactgtcatctgcttttttcttcctgtatcatctttctctagggattttggtctaactcactgacaatatttatagataaaatcaagaactttttcctcagaacaaagccactgccctcattttgctttctgctgtagcgttgttttgttgtttttcctttctcttgatctactgttcactccctccgtcacctccctctccttagaaaaatgagttagctatgatttgtgggttattggagaataaagctctagatatcttcgtggcttgatgatcatttgagaagaactgttattcctaaccattatctgatgcaggttgctctcatcctttttaaattaaaagatttggtgacctctgagcagttcctccagtcagaaggttttttttttctcttccttttaattgaggtttaagggggggagaaactctcaaaaccttgtttgcagtgttttagcaaatttatggaattatgttaatacttttgcaaagcttgtttattctagaaagatagtgattaaaaaacttccatctttttaatttgaccctaaaacagtataattttgtatgtgtgtgttttctttatcgcatcaacgaaagtatgtttccattctttttgaagttaagaattttctaattagtacattaataattcatatcccagctcattcatcgtatgtggtaacaaattgcatttagctatttgttgtagagttttttatattaaggatatagcattagcatgcaagcctacttcactgaatatagtatagttttgagcatttcaggtttcaaccattaagttttgttctgtcatctgtctcttgccacttagttttgtaattattttaatatattttgtagtactatttcgagcatttcaagtctcggccattaaattttgtactgttatctttttcttgcaacttagctttgtaactattttcacgtaatttggtgtttatgtttatccaggtatagtccaaatgagggcaggattggaaatagaaaatttttgtttattttgaaagcacaaaaacattcttaacgaattggagaataaatactatactgtatatgcaaaactaacatttttagagcactaaagttgtattagcttaggaacatgtataatttggttggagaaaacaacttttatttttggaacatcaaatttaaaagttatgtagcttattcggatactaattaaatatactaattgaatttacttttaattgttttctacatttgttagaaatagctcattaaaatgtctaacctctcatgcttttttttcagaaagtaagcaaaaattaacattgcaaaaacacttatgttttggggcttatatgttttcagtaacagggacccagcacatactcattttcagagtaggagaaaatggggaaaacatgcccagattgaatataattttagttacatctcactttttaaatatctcacttttgcctttcttctagacttcaggaaaatgttgcttaggttgagacaaatgctttagttctttcctatgttattgtcgttcttattttggtttcgttatttccataattaattaagctgttgctgaaaaaggagggctgtggaatcctcaggaggaaggttggagagtattaagaggaggctgcaggagggttgttccctggcagaaccccagatggcacacagtatccagggtgccacaggcgataccacaaaaagaagacacattacaccctacattgtcactgtgtggtggtgaacccaaatacagcagcagtggtaaaagttggcctctaggtttccagcagtacaatttggctgacaagaaaagttcttcctgtttctgtttctggtttcttgggtgttttttttttttttttttttaagagatgaagtcttgctatgttgcccaggctgccctcgaactcctgggctcaagtgatccttctacctcagcttggtgagtagttgtcattacaggtgcatgctaccaggccggccatctatttctgtttttaatgacatcttcaatttgaattttttcagtattcccagtcacaatttaatggtcaaaaagcgattgttcatacctgagtgtgagtctgattccactgtggcaccctcagcacttttagagcccaaaagacatcattattgtttgttgaataacttttttagctaactataaaagaaaatggcatcttcctattgagttttcatatagtatttcaatatcactactgtattttttgctttctcccccttgtttcatttgaaaaaaataagtggcttcttcacttccaagcgaattttaattttttaggacagtttttgcagagcacgcaatttcatgacattataacgaagcaagtaggccttgggatattcattctgttccgttagcaagtagacgtttgcccatcgggatttctctgctacttctgagagattttccagaccttcaattgccctgacactttacactttttataactgcttctccctagttttaaaaacttctctacaaacaccaattaaggctatcacaaaatttatgctttccttttcctgatttcttaaaaatgtttctatttcttaaaaatgtttctctttcttcaaaatacctagttcccatttgtaaacctgccttccattggactatacttggttaaactcagataccaaatcacatgaaaataattgtaaagttaagtggcaaaggacattcgttgattgatttgtaagtggtacaagacaaaatgtttgacttccttgaataggtttttctctgctggtacttttcttataaaggaggcaagagtttgctgtataaatggtatatcattttttgcaattaaaagaattcatgactgggtgcggtggctcacgcctgtaatcccagcactttgggaggctgaggcaggtggatcacctgaggtcaggagttcaagaccagcctggccaaaatggtgaaaccctatctctactaaaactacaaaaattaggtggcacacacctgtaattccagctactcaggaggctgaggcaggagaatcgcttgaacccaggaggcaggggttgcagtgagccgagatttcaccattgcattctagcctgggcaacaaggagcaaaactccatctcaaaatgaataaataaatataaatataaataaaaaaattcacaatgacattttcatgattgaaaatgacagtccagaaaaatacattgctcttctaagaccttgttaatcctgttcttccatgccttggttgacgtttgaaatcactgaaatttgtttttggttaaacctgctacttaacagtattcggttatttgtgaatattgattaggttacctttcataatgctgctaaaagaagtgcatgctggagaaagactttctgaaaagtgtttttatttaacaagattactcctataccatttaaagaattctttaaatgtttcgagggtattgcatacattttacagatgtatttggtcatctcttgcatttggaagtagatgttttatttgataatatttgtacatcatacatagattacattgcagtggggaaacgtgcctgggagctacatgtttctctcaccatttcattgaaagaaaaatacatttcagcacttagctcgcaagtaggggttctaagctgtggctgcacattagaaccacctgggagcttctgaaaattttcattcccaggctgtctcctaaaccaatttacagcagcctccctggggccgggactcaggtgtgggtatttgtcaaagctccccaggtgatttcaatatgcagccaaggttgcgatccattgctttagaataaagttagaagcatctcctcagatttaactgcatacaattttggagcttgagtaagtttgatttcttaactaagtacttgagtaggatattttgccatcattatcagataaagaataatttatttaggatttacataagttgtaaaatacgcaaatttggttaagtatagtttaatattttgaattcagaatcatttaaactcttccctttcagtaacaaaaatctctttccttttagtgttttatgaatctcacggtcttaggaacaaaagaaatcaggttttaactttttcctaattcttatatctttaaacttgtactatttctctttgttctgaaccctttgcataagtatctatttagataacttattccgaaagagtttgaggcagtttaccaggatacatgaagtatgacaaggtggtataaattaaatacagggtgaaattaggaaaaacatgggttgagacaatgtagaggttaaaaattcatgaccaaatgacctatccatgcattacagcaaactccttgagccagtggggccaacagatgtgtcctgtgacatttctgttggaaaaagtgacggctgctgccatggtctgtctctgtgcctttgaggcttagtcaggaattgggacacttgagattagggcgatgctcacacgcaacgaagaaactgagacattgaacagactgaattaactttgaacatttgtgttatgtgctaggcattctgcaaggagttttatacatctcatttcccctacctcacaataatctcatgtagatagtagtaatctccttttacagaaaaggaaactgaggctcaaagttgttggataacccgcctaggtaatcaagccagtaaatggcaaggccaagcttccaagccagctgtgacatagagtgcggcccttcagtagtagatcctggaggatcagatccttgctagtcacagttcctgattggcctcagtactatttgtaggagaaataatgttttgtgtgtgggggggaggggggagtggggggggcgtggaaatgaaaggccatatagcaatatgagaaaatctcttattatatttagttatggcagggtacagtggctcacagctgtaatttcagcactttgggagaccaaggaggaggattgcttgagcctgggagctcgagaccagcctgggcaacacagtgagaccctgtctctacaaaaaatttttaaaaattagctggatgtgatagcatgtgctcatcccccctgctactcaggaggcttgaagtgtgaagattgctcgagccaggaaggttaaagcttctgtgagctatgattgcgccattgcactccagcctggacaacagaatgagattgtctaaaaaaaaaaaaattaagtttttttttccctttttttattttcagttctgttattttttgggggaaggggaagttttttcctcccaactcctcatatttgtagggtaggatactttattttgtattcctcaccacacctagcatgacgcgcgtaatgtctggtttggcaaattttgcagggctggcataacagcagtgtgtgggtgtccttctttgatatgtctttcttgcacatggctccctgcagaggggtgctgctgtggctgccacttcagttctagcaggtggataggggatcttccatgctaccccattttaaggttggtcttcccactcttgtgaaatttcacttgtgatacatttcagatggagctgcatgaacagctctgtcagcctcagagaagattaactactgtgccatagcttggtttggcgcttgtgacatgtctaagtctcatttcctcggtttccaagggagccactgtgttcaattccttgactatatttttggcaaatgtgttgcctgcatttcagagttctgtagtttctcccatctttgacctcgtgggatttttgtttgtttgtttgcttgcgtttcttttttaaatctcaatgaagtttttacccttttctgtccttgtgaaattcacaccactttagtacaacagtctcccttatttccagctttgcttcttacccctctcctccagttagactctcctccagttagactcagccaggcagtactgtcggccagacccactactgggcacttttgacactgtcggcttccttgcagtcgtctgtgtccctcctctcacatcccccaaccttcctctctgccttctttcaaagctcagtctaccactttgccactcaaagtctggtttctggacccacagcatcagcatcacatggaagcctgctagaaatgcagattctcaggccgcactgcagcccttccgaatgggagtctgcatcttagcaaattgctgaggtgatctgcatgcccatccaaattagggaagcaccgctttaactcacgcttctgccttgggttgtgacctaattaagagaataggatgttagaacccattcattctgtcgaaagaatcagctaaaacatttttatattttcaaattgttcatctttaggcaatagttttgtcatttttagggatagggacaaacaaatatgcttggtaatgaatgtcttttcctaaccatatgaatgcggttagggcattaggagaagcttagataatttaaccaatagattgttaccaagggagctttcaaataacacccatcattgttttgaaaagaatggaggggatagttttgtggaaagatttctagttttcaggtttttaactttcttctatgtggaaatattacttatcctggggatcagtgatagcataggtcatatctcaagacagagctacagatgtttctccctaaggcgagtttcatcatgtccttaagcattaatgcttgtggaaaagctgctgtgcaggacaatggatggtgcaggagttggggacatggacccccctagccaagaagtgaagagggatggctcagctgcatggaagaagaatgtgaggttgagtgatcaaactgatggaaagccactcttgggccccctgccccttcttttacctgtccttatactgctcctgtggttgtgttggtgtggcagtatctgtgacccctcatcccccactcatttaaattctggaaccttttaatgtccagatggtgtctctaagactcagagttttgaaggaatagaatttgctaagttatatctataggttctacaggttttctaaaggagttacacacacacacacacacacacacacacacgctcactgcaaagtcagagaacctgatactttgggtgggaagtgatactggccatctaaatgcaaagggctaaaaagtgtgtttttctagactgactcaaccttgccttcaatgtaaaagaatttccttttgtatgaccattagttgttttgtgcattttgataaattatttaaaagtttggagttacagcactagaaaagcattcacttacatttagagtgcagctgcatttaagagacattgttctcgtttctttgaacactaggcatctgtttaaactggaccctacctaatgctacagaccttcagtgtgggccatccccgcactgagcagatgctattgacttgaaataggagtggccagggcagtgttccatttctccttcagaagtgtcttatggcatcagaacctaataccggaaacagatggaaactgaacctcaggtttcagatcttattcaaaggataagagttgctgaattgaaaagtgtcagatttagaaaacctgtaatcagtcaaatggatgaggggaatgatgaaggaaaatcattgttatatactgagaagaaaaaagaaaaattagtagtttctaaggagtttatctttggttaaaagcacttcatttttattattttttaatttttttttgagacagaatcttgctttgtcactcaggctggagtccagtggcacgatctcagctcactgcaacctccacttcccgggtttgagtgattctcgttcctcagcttcctcagtcattgggactacaggcgcacaccaccacactcagctaatttttttgtagagacaatgtttctcatgttggctgggctggtcttgaactcctgacctcgggtgatccgcctgctgcggcctcccaaagtgttgggattacatgtatgagccactgcccccagccaaaagcactttaaataaacatatatgttaaggaacgtatgagtgttacatattacagaattttggccaagttgtcggatatataggatctttttagtagtatgaggattaggcagtactggacaagcaaagataacgtccaaattgagatgttctgcttgggtaactttgagttaatgtgaagctcattattattgaatatattcataggatgcataaatgtacccttctttcatcaatacataatggcaaaaatgaggtttctttgatcatttaggttattcttgtcctttttatggcaccttgaaagtgagttacactggtctggtacctttgattgagagttacattagactgaagcttttatgggagtcatccgacaataacttaaaacgagaaactgaaatcaatatgaaactgaatattccagaaaaatgtgatttattgaaagtttccttttgttttatttctcagctttgttgttttatgtctttatataaaacaacaaagaataaaatatattttattctctacagcagtgtttccaagatgtgacccacaaagcattcttttcctgctctgttaatatggattaaactatggcagtttatctactgcaggacttctcagagcctttgacagtactaatattccctgtgattcttttagaatgagatatattatctgatctttcccaagcttattttacttcgcctgccgctctcttccctgccacctcctttttttagttaatggaatatctactgtggcagatagctgggaaataatactgtagcattttcaaatgtattttctcatttaccatcacagcagtcctgagaaacagggacagttttgttgtcgttttttggatgagggaggagctaagatccaccagagttcaggctggcaccaggatgcaggtgtcctagtaactcacccagtcttttatctccctgtcaagccttcggttcaggtatgaggctcttagtcctatgtggcagggctctctgctggcagagttggggggtcatctgggtgataacagtgatctgaagttcctgtgtctggtagctggtccacagggctctgtggtctcctgtagagaactttctaatctgagttgataatgtgggtgagagaattggtccttatataccttctttgaagtaatggcttaggcagcccctcaggtaggctttcgagtaggaaagttacccaggtactcaactgtgattcacttgtgttttgcttgccaattttcaccccatggtactatgtcatgttttgctctttttatagaaagaaattcaagccatgagtcagtgcagccatcccaacgtagtgacctattacacctcttttgtggtcaaagatgaactttggctggtcatgaaattactaagtggaggtaagtggattttgttgttgttatttatttgcttgttttctctccttttgttggaaccagcatattggagaagactttagattgaatcctttctctcctgtgtttgaaagtttgtttggtttctcattgcctagaggataacgtccagattgcttcacattgaccttcaaagcttttcataattttgcttaacttccgagaatgtgtatgtcctcttctccaggtatgaaatgcccgaccttctaggctgagaggcagcccccggaatgtattatgtgctctcatgcctttgcccctgacctgtcctctttctcagccttgcatctctcctttgttttccatgtgctcaggcctaaaaggtcacatcctctccacagtcaccgcttactcttcaaaaaagttagccagtcctttctccttgagtcctttctttttaacattgttcaggtccttaacacattgcagtttgctgaattatctcagtgccatttatcagaatgttctgtgatgatggaaatgttctgaggtgctgctatctactttttactaatcccatgtgactcttaagcacttgacatgtggctagtgtgactgagggactgagtattcaattttaattaacttacatttaaatcaccttgtatggctccagtattggacagtgcatatttaggttgtggactttgtgaagattgtctaatgcactttgaattcattgaacttggcgcccagtaggtgctcactaaatgtggtttcagttgacatggggagaaatgtgtgctacatattcacttgcagtgttgatcagaaatggcactattgtcatcctattgttgcatttgggaagggaaagtcacttcctctctctagcttcagatccctgcagtgatgcaagccattgacaatttaatttacaaggtgctttcacatcctgtattttatttcttttaatcttctaacatcactatcagagagggaatgataatgataaccgttgccttttttgaacacttactctgtggctagatcctgtccaaggcaatttactgaccttatcccatttaatcttcacagtgtccctgaatggcctgtgtcaccatccctgtttttcagaaattacaccaaatttcaagggagtttagcaacttgcccaaggtcacacacatagtaaatgttggtgctggaatttgtgactttaacatctgttgacttaaaaatttgtatgctgtgctgcaagtatttacaccttcgttttgcagacatgggcactgaagcttagaaagcccaagtgatttccttgggaacacccagcatacccacatctctggtgtgttctctttcgagggcttgattctctgggtatctttctgagacatgaagtatggtttaggatcagaggagaacattttgctgtgcctggacaacccaaaactagcatagcagaatttatatgatagagcctattttaatctgcagatgtcgagggaggtgttttaatgttttccttttttaaaaaggaaactctcttggatcaagcagaagcccaaaaatgagatgacgaaggcattgtaattggcttgggtctgcttgtgtaggtctcggtggggagccctggggagcttagttctgttctgttttcagtcttcctcagtcttattagtcattgtttccttgagtgcctacttcagtttttaattaaaaagaaaaaaagaaaaaggaaaagaaaaaggaagcctgccagagctggactgcagtattgagtgctgggactgcccctttattcagcagaggaacttgcgctttgccaacaagatgatcttaaggcattctctttttgtggggttccaccaactctgaggaaatgagaaattctgatgacttgagaccctgaatagtcccaaatgctctgctcaagctgaagattttaccttttgctttatgaagctgagaatcttctgttttctgaggaggatctgacagaaaatttctttgtctttttgagtccaatttagcctctctgggctttaggtaagaacagattttaaacaggtttccacaggtaaggacgtgggcagacgtggactcttgttcatttttcttttagcaggacagaaatgcatgcatgcctggtatggtatatccttatacaataaaaagaaaatgtttttggaattatcattttttaaatgacacaaaaatctaagagtcaacaaataaacagaggtttttttttcctctggggaaaaatatgcatttgttttcttctatttcattacattgaatctcttaatgaggggcaggcagctgtatctgatggggaagctcaatcctcttagttaattataaagagcctagagccaaattcaggtcctgaggtaagccgtttgttaactcttcagaaatgtcaaacccccaggtaattttggcttttaaactgacccaggggtttggaatactaattaatatgtgttgaaacatgaattcacagtgccaaggatactaatctgtatatggtaacaaagtactaggtatctgtttgtttattgtaagtgttagtgcctcaaatatatcaggtaaatgaaataaagatcagccaggctcagtggcttatgcctataagcccagcactttgggaggccaaaggtgggcagatcacttaagcccagaagttcaagaccggcatgggcaacgtggtaagaccccatctctacaaaaaatacaaaaattagccaggcgtggtggcacgtacttgtagtcccagctacttgggaggctgaggtgggaggatcgcttgagcctgggaagttgaggctgcagtgagctgtgattgctccactgcactccagcttatatgacagaggcagactctgtctcaaataaaaaaagaaaaagaaggaaagaaaataaagatcaggtagtgtcacaggaaggaatcttccggttataagcagaggtctagaaacaacatacttctttccccctcccacctgtgatttaggtcctcaaagagtgtgttttttttctctcagcagttcacttctgccttttctcctggcctcatactcctttctttgtcagttcagactttttgcaccctctttggagggttgctcttaggaatttttgtgagaaatactgtaaccagaaaaggaaccagccatggaacggccatgaacagccttctggtccctgacccagaatccttctcgttaaattcacactgaaagtgctcttgcaaacttggatttagtgtttttggtcatggggcccccattcaattgtttgtttgccttgggaatatttgcattaaataaagcccatattttgatgtttctattaaattttatacataatggagtcttgttctgaaaaggtgatgaaggtgcttatgttttaattcttctgtttgtctacttaggttcaatgttggatatcataaaatacattgtcaaccgaggagaacacaagaatggagttctggaagaggcaataatagcaacaattcttaaagaggttttggaaggcttagactatctacacagaaacggtcagattcacaggtatgacctctgcagagatgtttaaattcagatgttcatatcttaaagaggttttggaaggcttagactgtctacacagaaacggtcagattcacaggtgtgacctctgcagagatgtttaaattcagatgttcatatcttcagccctagtttgtaaagaatgttaaggaaacacatgttgcaggcaggtattgacattactttaacttagtctaaatagatgggaaaaaagtacttaagaaagaaacaagagaataaattttgatgaattatattggtatccttgggattgcttcagttgctttcactgaaataagagtggaatctaaaaaggactacatggactcatttaaaaagatcagttttggtaactactcttgaattatactagttgaactagacagcatctctatctttctaatacaagcaagactatccaaacattgtactatgtgaattatttttgatgtggtggtgagagggaaggaagaggtactcatcttcttttgtgacataaaatgttaattctttacatagtcaaatcacatagaatatgagtgcttgatgtttcaagtgagtgagtgctacttgggctcttaggaattattgcaagtaaatagccatttaccagtaatactaataatgtaattctcctaccctgaaatttatatttaattatttctactatatttttctttttctttttttttttgagacagagtcttgctctgttgcccaggctggagtgcaatggtgtgatctcagctcactgcaacctctgcctcccgagttcaagcaattctcctgtctcagcctcccgagtagctgggattacaggcatgcggcaccatgcctggctaatttttgtatttttagtagagatggggttcaccatgttggccaggctggactgacactcttgatcccagatgatctgcccaccttagcctcccaaagtgctaggattacaggcgtgagccactgtggctggcctatatttttcaataattagaaaaaagttactttagaaatcaaatttataaattgcaagttgtcatttttcaaagtactaagattacacaggttttatacggtgaagaaatataatatctattattataattagtatttataatcagtctctcaccagagagaagttcatttttcagaaagataattaagttggaattgcatcccaaatttaagtggaagtagaggagctttacatagactgggctttaatacttggtagaatgacagtagtgtgagtttatgggcagtgtctaactctgaagcataaaatagagagtctatttactgatgatttaattaaatttggataattatttcatagaaaatatttctttctaaaatcctaactctcccccacgagtaaactataaagtgacaggtggatccttataccttttttttttttttttttttttttttgagaccaagtttcactcttgttgcccaggctggagtgcagtggcacggtgttggctcactgcagcctccacctcccaggttcaagtgattcttctgcctcagcctcccaagtagctgggattacaggcacctgccaccatgcccaactaatttttatatttttagtagagatggggtttcaccattttttccaggctggtctcgaactcctgacctcaggtgctccacccaccttggcctcccaaagtgctgggattacaggcgtgagccactgtgcccagcctatccttataacttttaaaatctgtgctattatcttaatatttatgaaattattatgtcaaagagctgcgttgtatgatatgttttaaaatcttcctgagtgaatcaatacactataaagtctgtaccctacaatttattttctatttttttttctaatagggatttgaaagctggtaatattcttctgggtgaggatggttcagtacaaatagcaggtaaagctgataaatagaaaaattttttacttgattacggaagtgttacagtttcaaggaatgtagaatcattcctgagaaatgaataaatgcatgtaatctcttttcagaatgatatttacagaatgtttgggtccgaaggataacatattttccttattgttttgataagtcattagatcatcctgtgaaaaatgccattttagtacatagctttttgataaagaataattttattttcaattttattatgttttctacctttcacattttataatggtaatactcatataacttcaagaaatgcacttgtaaaaacatttttcgataggtttgaaaatttaaaacatcatacacatcaattaaaaactaatttatttcttaagaggtatctgaaagaattgtgaacattaaaaatctgggccttattttgtttttaactctgacccaacatggctattcttgacaaagctggtaggctggggatgcaatgaatgtcttttacatgaacacacaatatcaggtgagcacctttcgtgttcaaagcctctattttgttattggccctagagtaaccttaaaggcctgggataagatgtagccacgcccatattaactcttgctttacccatgtcgttgaaagtctgtctcagcaatccttttagctttcatggtttcttgggggagtgttcttggcattttttggctagacagtcattccctctactggagtgaccctgtcattgcagagacgcgtaagatgagcccacttgtacccatcacctagtttcaataattatcaatctttggcaattcttgattcatctgctgccccccacccccaccccccgactctggtgcctctcctcatcgtggaggctggattttgttgttgagccatctgagttagtgctttgtgtgtgcatatcttgtcctcatgagtggaccttatcccataggctaaggacagtttgaaaaagtacttcagttaaacaagtaacagctaagagacatctgtgggcaaagatttcaaactgtccagccccaagcagtctagttgttcagagtgcaggctctggtgtcagctgacttgatcgaaattctgaggccaccacttagtagctgtaccaccttgggcaagttaccaaaccttcttaagactcagtttccttaaagaagggtaaaaatataaactacttcatcttctttcatgaaatcaaggtccagtgatcttaacagtggccaacacataataggcaagcagtaaatatcaataactgctgttctaccatggctgctgctgctactgctgttgctactattactactattacttctgttactacgactaacaggatcacagtgatactcccttgcactgactggagatcatgtgaccctcaaattgtcctgcaagagcttcagctctgaggagagtttatgacttatcaaaaggtaatacttattaattatggaatttggaagctaacttgccattaatcttgctctaagatgataaggaagtacaactaattttctgttttatgatgaaatgatgatttctcactaaaagggtcaaaatagcagtgaactgcctttgaaatgtgaaggctggtcagcccctgccttattctgttacttggtcctctgccagtcatctcatcccattattcttgtcagattaatgatccgagcctctccctgagccttctggaacacattgtccttttctttttcccagtaagaatccccgaggtaagatttcctggctttttccttccatcacaggcctttgggtttttcctcactgccgaggagtctgttgtgacccagtacgtgcctgcactgtgcgggctgctgagttcagaagggctcaggcaggaagcccctgcacagggtaggtgtgggaattaagtgaattgatgtgtagagagggctgtgccttttctatgcctggcatgtgctgaggactttgtgttccagccatccgggacttccttggtatctttttgagtatgcgacttcatgcttgtgtaataacacaaactggaatggccatttcccagatgtatggtggctgcttgacaggcacctaaatgtacagcttctgcatctctggaactgtcgctttctagaattcacatttaatttctcccatattctctgacctgatcataacatccaactaatacagtatttaaagtttgaatttttaaagtgttcactataatataaggttattgccttaaagcatttttaatgtctccttggaaaggtagatgttactgctgtcctcattttataggagattgactttcttggtcaggtacttggttgctgcctgaacaaaaatgaggaccaggagtctctgggtcttttactggcatccttgtcggtgggtgaaacaggcgagatcggggggaagagtggaatgtggagactcagcaacggcaggggtgagacggtccctttttgttgctacctggacaaataatacattgtttttacccagtctgtttttgctctttcccctttgtatctttatgcctctgaggccctgtagtttgaaataaaagttaagcaggggagaagttaagtttgcatttatttctttgagtgtaatatacattgcccaccttgagaatattattgtgtgcactgtttttaagaaagggcatttttgctatcctaatagaaaacataatgatttttgtttttttttaggggaaacactcacttttacatatgtataaattccctttttcagaactttttatcagaaaacagaagattaaagggcctgatttagaccatgagaaaccctcactttattatgcagctagaagtgtggtggataggataatgagcctggttctgttgaacacagtccaaattctctgggaagaatgtacatttctattgaacgtgggtataaaatcaggaactaatgtgtcttgagtgcttcctgtgtgtcaggctaggttttggattctgaatgctttgagtctcattcagtcctcagcacaactccatgaggaaggtactattgcatccattttacataggagaaactaaattacagtggggaagtcagttgcccaggtcacacgtagaataagcggtgtagccatgctttgggtttggacagtctgactctagaaactgtcaactcacatctatgggatttccaggaggaggaccttaaatctggatttaaatgacctcactttcagatggaatataccccagcgatcactagctcttctgtgtctctgcataaatcgattcccctttgggccagggaacatattcagcaccttcttcctccttgctccttcaggctgaaacacaagggtgtccctggtaaggtttcagggcataggagaagcagccatctaagcgtcatttggtatagaattaagctcaataatgacaccacactcttttcagactggaaaacttcaggtttgatgtagtgaattagaacctgaggacagcctactcagggtttaagagaaaatgctttccttcttactgtaccttctatgcttagaggtccagtgtgtgtaacttcctgataatcaacttggatgccttggaaaatgtaataggttttgctgcactgtgtgatagaagggggagtggctactcgaaagtcatgttcttcccacggcatagcattttatcttccaatttgatgccctgtcatattgtcaggaagagcttagtgctttggcaaatgactaagcctgtttgtccagaattaatgagagacactattttgagcaaacagaaattcatatgaaacagatcactttgaggtggtttctgctaatctttttaatctaagatttaaaaaaaatagtggctactcttgatgttctataaaaatgttgatttcaacacctttgatttataaagaactttgtagaagcttactactacattatgtaaggtagatctcatgctcattttcacttacgtttgccttttaggtgtgtgtgtgctgtggtttgaattttgtgtgccctccaaattcatatgttgaaccctaattaccaatgtgatggtgttaggaggtggggcctttgggaggtaataagatcatgaggcctaaaccctcatgagtagggccagtgcctttataaagaggccccagagagctgccgtgcccttctaccatgtgaggacacgaacagaaggcaccatctataaacaagaaggcgggtccttactagatagtgaatctgccgatgccataatcttggacttcccagcctgcagaactgtgataaataagattttgttgtttttaagtcacccagtctaaggtattttgttatagtaggcccaatacacaaagacagtgcttatgtgtgtgaatgtgaatttcccttccctggttttacataacagaaataaaaactggtactgagcgaaagcagcctggaactctagaaagttaccatcaaaatgcctcacgtatgtgcatccattcaaatcaagcttatgccctgggtttttcactgtccaaggtacattggtagaactttgggtagcatctcttatttactgggagggagataatatccttatcagccttgaatacatcttcattttaaatctgcatcttgaacactgaaaaccccatgactaaaagtgctaggaaaacatgcaatgaaacttaacttgcttctgtcacttaggcgttatccattaaggagctagaggaagatgggcaaggtggttgagtttttacacccatagctgctaggttctttcattttccttctgtggcctttggccctcataaagtgcactttgatggggagggtaggggtttaagagttattttttgtgttgtagggaagagaggctgctgctttgagcaaggcacccgagcagcgctggagtcagcttctgattagtgtgggaaagcgctgaaagccccggaggcatccaatcaggaaatgatgtcatcacatttatgagcaccttggcccagagcatgggctctgacaccagacagccatagttcagtcctggcattgctccttctagctgtgtaaccaagttatagctttagcttctctgtgcctcattttgcacgtttgtgtaatgagaatatactgcggcattaaaggagttaaaacacattttattttagaatttgctaactcattgctttcgtattgaaattgggatggtgtcctctaattacttagggtgtggtaagctcacggtggctagggaggtgcgaggccttaggcactccatctgacctcctgccgtgttattttgctcttttctttttcccatcagtttcctcaatatcaccagagtgaagaatctgcagtgtagatctgactgtatcttcctcttgcataaagtttataagcattgttgatggaataaagcattgttgatggaataaagctccagcttcctactaatggcagatgagggacctgcctgtttttctggtcatgtctgcaagtgctttctgctgtgacttgaaatgcttatagcttcttgttcagggttcccctttcttacctgagtaacttcttttcatgacttattcatgaagaattctttccttgagaaacctttcatgatcatttcctccaccatgcccacctgcaccaggttaagcccctcaccctggtggtttgcaagggttctggccatactctagctagcctatgacacagcactgacattgggcctttactttcccatcttcccttcagactggatacttcccagagggagaaactgtgttgttcatcgcagcattcccagatggtacctgatacatggcaggtgttcctgaactttgggtcagtgcactctgcctagaggcacgggagacaccctgtctcagcagcaggttatgcaagtacatgtgcctgttggtggcaaagagaacagatgtaaggcatagctgagagttgaaatgagtaagaatatatcagcttagcagggagggaggcagaaatattttaaatatttaggtatgtatactactgcatattttaaaggctgaaaatagtttttaatggggaatatcacttctgattttggacaagcactgccctagcctgcaagccatgaggctaaagttaaggaagagtgaagcagagaacatgaatgaagaggcaactggttatactcagaaaatagaatacacatgaaaattaaaatctgttggggtggggggggtgcaagtgctttatagtgaaccgaaatatttgttttgagtttcaggaacagtttataactatgtgaattatggtttgatgaattacgacaaaattctcatacatgaatttttttttggcataagtgaataaggacagtaaattaatgtggctccctgatttttggtatctcgacaaatggtaacatttgataagagctctagaatgaaccaagaatgtactcagttctggaaactgagtttttcattccagctgcacaccatcagtgagaaatacttggggagattgtaagcagcttctcatgctttaacagctgctagcagttgtttgagcaacagcttaaggaaatgttactgggtgaacccggtggaggagaaccactttgctctactctcctgctggaatttttgctcagctctgcacgtttagctgcaggggggacagggttgagcttcacagaagagtgtctaggggggcatgaggcagatgggactcagtctccctccttccctctcttttttccttcctgtaagggcctgcaattcattattaaattaaatttcacatattaccaaatactatggaggtctgcctaaaataagagtttttagacttgaaagcagagcaattcggtcctttgcttattttttcgtttatttttctttttcccagaacctccatttgtatagcctgctccttctgtgggagaaaaggtaaacattagatgtttggtttcagtgtatcctcagtggttagttgacaggtatttattgagcatttgctatgttctaggcacagtcctctcagctgacacagtggtaagcaatggagacattgtgtctactgtcatggagtttaggtgacacattaaacagtcaactatataaatttaaaaaatgtgttaagtgtgaagggaatgcctatacctgggtaacttaagttatccacattaggactagttgaataggttgtaatggggataaattttaaatatgtattgtaaataggttttggtcaataacatcttataagttactgcatgtatcatatgttgattacagatttttaggacatttaaatagtgttaacctgtgtttacattctgtggaatatgatttaacacttgattgtatgtagtacacttgaggacacagtagccagtctaggcccccagtggtcattaacttactgtccttaccctttgctggccatagtttgtatcacctgtaaaatgatgtgcttaggctctcaaatttccttgcaactctaacaagtggataactttaatagagaactctatgacccctgtgctcctgaactgtgcttctcacagtctttcccagttcttttagtgggagaaccattcttctattgaatgggccagaaatcttgatattcctcgatccttgtcgttctcttggaccctacatcctatccaatatgttagtaaatcctatggttgaccatatttcatcagctccctgctgtcatcctggtccacagacccatcagttcttgtttggattattatggtggtctcctaaaaggacctcttcttctgcctttgcccctctgtggtctgttctctacacggcatctggattaatgctgttaaactaagttgacttgtattatgcctttcctcaaaaccctccaaccccttgccatttcagagtgaaagtcaaaatccttaaggtggctcgtgaggccttacaagatctggcccctcattatgtcattgatttcaactcttacatcttcctcttcagtcaaatcggcctccttaccttgcatgctgctgccccgggatctttgcatgggccgttccttctttctggaatactcttttccttacctccttcagatcttggctcaagtgtcacatcagtgagacttccaggcctcatattgtaacccccccccaccccatattttgtattccctgccctgctctgttttctttattgtacacatcagcgtactctctatcagtggctctctcaaggtgtgctcctagagcagcagcagcagcataaacttgataaaaatgcaaactcttgtgttctcctaccctagaccttctgaatcggaaactctagaggtagggcccagcaatctgtgttttaagaagccctctaagggttctgaagcaggctgaagtctgagaactactactatgtattatattttgtaattttgcttttatctgtatttacctctcccccttactcctgccccaacttaaaagtcagctccgtgagagcaggggtttctggtctacagtcccagtacttagaactggaagtggcacttagtaagatcttggcaaatagttgtcaaatgaattaataaacatctgactatatagtaaatttagattaaaagaatattgagcaatagttcagtgactctttaatgttaggagttttcagtgtgaggttttcttttatcacagatttggaaatctgcagattctttgaagattcaactaatccttctgaaaactttgtaaaacaatggtgtgcattgtttccttaaatacttgtagcaactggagttgtgttattttaatcttctcccatagggatcatatttttaacatgtacagatgggctattgtggcttaatggaagcttctgatagtagtgctggttgagtgaagatttgtttaaaaaagatcacctgcaggtatatgaatattgcattggaaatttagacttattaatatttgatctaagttgttcatgcctgtctctgcggatatggccggccaggagccctcgctgactttagaagcttgcctttggcttgggaaacaataatacctgtataatatacttacctggtgctctccttacagcaactctgtcagttcagcacaatagttccttcagatgaagcatctgaggactgctgagcaattgtggacttgtttaaggtcattctgaaagtcataaaagcacttcactctcaaatctcctcagacttcacttttgcttcttgccattaggtttcacccctaccccaccaatatacttcttaactctatgccttttgacggttgaggagcgccggggctcagttccttccgttgtaaagtaaggaagattgacaagatgttctccaaggacctatcttgcatcaaaatgttcaaataacccttcattagctgcagtcacttaaagacattctcagtactgttttgaagaattcaaatcagaggattgtcttgggtgtagagaggagagtaagccaagcctctgtcctgtggctgcttttaccagagcatctttaaaaatagtcctcccaccccacattggggatccagggaagaatggatatgtggtgtgggaattatctgtgtttttcctttgttcagtgtaattatcttatttaatagaaagttgaccactagtgaactcttgaaaaagctgtctcttggcctggaaccttcagcacatctgggctgggactcctgctccagccttcccttctgttgctgctccaggtgtgaccagtgactctacttcttactgaaaattcacctgctttggggcaagggttctgtagctctgacatagatgggcagattatctgtggtttgccattttgttcaactggtcctctccactgctgtggctaattgactgtatcagtcaactgaactttgagccaaatataattggcattgaccaccacttattctttttgtcccttttaagcctgtggtgtcttgattgagagaatggctgaggaattggggagggagtagcagcttctgtgtttttaccaagaatcctgttgaattttttttttttttttttgagaccgagtctcactctgtcgcccaggctggagtgcagtggcgtgatctcggctcactgcaacctccacctcctgggttcaagcgattctcctgcgtcagcctcacgagtagctgggactataggcacgtgccaccaccacacctggctaattttttgtgtttttagtagagatggggtttcaccgtgttagctaggatggtctcgatctcctgaccttgcaatctgactgcctcggcctcccaaaatgctgggattacaggagtgagccaccgtccctggcctgaatttttctttcaatttttctatcgtgaattgatttgattccttgtagaaggtgcaaaggatgtagcctatttgaaggaaactggttgatggcaatgtcaagagtctacatatgagaccccagtcatgggaaggcttgcttctttgtgtttcttttattttaaaagatgaaactctacctttatggactgtcttatgatttcttcttttgttgtcagaaaaggctgtgaaactgtcattctctgatgtttcaaagaaggttatgactactgctccctcattaatagatagggaagatggatttgataagtgactagagcatttgataagtgactctctagggcctagactcaggaaatactgtaggattatgtttttttgactgtgaatgacttggacaccatgccatggttggggcccatggcatatagagccaaacaaggccattgagcaccatttgctttcaagaaggaataaatagaaatgaaaaccaggagcctgatgtggggtgaggggaagggattgggtgggagtgagggtgtcagaagaacctctttggttctacatggttcctcttggggtaccaggttctctcccaagcaagatgggtggtgtgtcccaatatgtagtggtgtgtgaataactgattactaatagtaaagtgccaacatatttattgacttgcttaaaaggtaagcagattcaaggttatcactctaataatatgatatcaggttggtgcaaaggtaatgtggttattgccattgcttttaatttaaaaccgcaattacctttgcaccaacctgatatcacccttacacaattcattagaggttttcacaaatgagagagaaaggagtagtgccacataaatctgtgcaaagaatcatgtttacctatagcctctctcccagtaccatcacacctgcagtgagcaactgttactgataaactgttagtaagtattgtgattataaattattttcatgcacttaacaaagatttcataaaaatctgtgtattcccaaagaggtgtgccatgtatatgaatttattctactgcacatatgagacatagttgagaatcgctgggttagacaattctgtgtgggatatgatttatgtttttagaattgcccttggactaactgtgtcataagatacatgaacatgcacacttaactacttttttcctgctacgcttcctcgactgccatggttctcttcatctgagaggtgaaagaggaacctgtggagttggctgtgcattgagatcttccagtcccactgaatcacgccatagtgcctgctaggaggacagtaatctagagtagtgcttctcttcttcgatgtgcgttcaagtcagctggggatcttgctgcaatgcagattctgattcagtaggtctagagtgggactcaagattctgcatttaaagcctcacaggtaatgctggtctggtttatggaccccactttgaattacaagggtctagactaggatgtcgaacttacttctgtttcctattttcctagaagtgtgctattttctttggtgtaggtttatgtaaatatagccccagcagcaactactggcaaaaaagcgaattagattcttcttgcagtatgttttcttcccccttgagatgcctctgcatttacttattttaatttgtgcttctggcatgaaaagccatgcttgatactggagctgttttaaaatccaaaattgcactgtgtgctaaacggttttcttgctaattttttaccaagtccttttggggattgcagtgactttggcctctgatgcaatggttaacccttagcagtcaggaagtgtgaatcagtgtggctagactgaggaaaggcaggagactgtaagagttaagaaggctttgggtacaaataacagagtactggtctgaaaggagattaagcagcagaaacgttaattatctcacgtagcaagaagtctgggcatttggtttcatagttggtgcaggggacctagagatgtcacagaggtcatggactctttccttcttccacttctgcactgccagtggggattgggcagcacctgccagcatgggctgtatcactcccatacatcacatcttcatgggctgtcatcactgccagcatcacctcttcacatgaccattctcaaacaggaaggagaatggggagcaaaggagccctgtaggatggttattttattcaggagaaaaacttcactgcaagggcctgtactgtattactacctttggatcttacaggtcaggactagggcagagccacagaccattcactggtgaaaaagaaccatatgccattattggcttatatcaataaggtgaatctcccaaggcctggcaaacaaaatcaagattctggtaggaaagaacaggatatggatgttgggtagtcagccaacagtgtgtgctccaagaactgatactgagaagttatcatattctaagctcctcatggtaaagcttgaggacctgttgctcaaagaaggaaacgagcagggagtgtcattgggacttaacattcaggcctgttcaattttaaagcacctctttggagcggaaacatggctcctttgtatgcactgtgtcttcccttgcagcctgtcttctttctgttagttttagggattattgatggcagacttactagaatcaggatcccacagtatgcctctgaataggggccacatatgttacatcacacacgttgctatctggcctctttggccgtgggtgtgctggaataccactataataatagaaggaaaactactcctatgtgcaaagtggcattatttcaagaaggaagccagctcagtgagtgtgggtggctgctgctgccggtcttgttgcatcttgacttgtcctgctgagctttctgctcttcttcttgctctgagctatgctgtgttctgctgagcacagcgcaggtgcccagaagcgcaacgtccacctggaagacttaagttatccctctgcctcctttgagtcaggacagcagaaagctttctcctgctttggattgcagggtttcctagtaggttggagggaaggggtggccctcccagtttgcactcagagttggctttcagtgcccagaggtctggtgacattctgatgatggtcaggctccaggaaaaaagttgtgcctatttcctctataaacaaaaagaaaacaaacagaagtattagtatccaaaggctggatttaattatacataaacttaaagcagaaatggtgatttggtcagttaagggagcgaaagcactttgctaaagtataccataattgaataagcattgcaatcagaaggaaacaatactagaatcctgttggcttccatataaatgctgaattatggcctaggatgagctttcttgttattctcaaatgccctggagggagaaggattttgaccagagagtgctatgatcagaaactgcactttaggaagattaatctggatgtaataagtaagtctggattgcagttggaagaggcatgcctctgattctgtaactgctaactgctaaagccctgactttccctggtctgtgtttttcttctttcaccaagaaaatcgggtgaaagggccctgggaattagcagcagaagatggtgcttttagtgctgagtgtagtatactgggcccattagcatgtttcttgtatttatgttgtttaggtcatgtcatagtcattctattttagttaatatattcccccatgttagctctcactgcaaggccaggattatgtctaaatcaaaactctgttagcctgtggtatctaaacccactccgtgcatgtacacaattgtgcacacccatgtgtaccgggcataagtaggtgctgcaccactgacacacatcctagtacaaaaataatatgaaaataaggaaatacatggttaaaaaaaatgctctctttagtctgttcccaacagaattaagaaaatatttgcttctgttttctactcattattatacagtttgcataactgaagtcacaatgtacttctttaatcatccaacgttggtggtataacattttaaggaaacctgtgggactcgggaaggccggatgctggcagccctgaaaatgttcccgggtgtttagaagaacatttcaattttgtcagtcaagtcttgagagtctctcatgagaaaaaaacaacaactgggaatcaaaccaaattataaagagataggttttcatgatataaatatgacatttaggattaaccagtgaacctcaaaccagtttttctgtgttgggtaatcacaacttgatctttactcagagaagagcttaggagttgcggaatcttaaccccattattgcattttgcatttccttctcaataaagaaaaatacactgaactttccggaagaggagactagggctaagtggctgactcctttctgaaggactgtgaattttattcagaccttcgataacttgctgtgtgttccttggcaagtcatctaatctttttattccttcctcttttcttaattccaatatctactaaatcatcgtattttcttaagaattggtctaatcctctccatttccaacctctctattcatatacaggctctgttgattttgctcctgggctatggttgtggtcttctctgcttctagtctttttcctttcttgaacatccctgcatggtcactttttccaaatgttgttcttctctaacgagagagggaacaacagctgttaattgaatcaggtacaaattcccttacctggtgctcagactctgtggttggttgggcccctcaacaatctcacccagtacttccctgcttttaaaaataatggcctctgtggaaaagaagctgcttgtaggaaagaactctcagggtcccctgaagctatgggggctcctattgctccagactcccacccagccacttaggcatcagtgtctcttttaactcattgtagctacattttaggaagctctgaactctcaaacattgatcccgttactctctgatcaaagagagtcaatgttgttcatgcacaactcaggttccttttcaaagagaatagcagatactgtagaagtttgaggtaggtgaggcttgggtactcacccacagcttcccttacaggttttagagaaatcaactttcagaccaaattttgcccttcattagcaagcaagcccctaaacagttctcacaatttgttctgtaagctcaaggaaatcccagttctttttcctcataggtgaatgaaaaattcattagaggcagacatgccaagattccagatgcagtttttgctttatccttatgcttgctactaggaatccaaccatccacagaactggctagggtatagtctacagttggactggactggattgttttattctgttcatgcaagagtaaggagtatatctaaaatattttagccactctctggtgctaagaacctttattttcagcagtgaaagcccatttctaacatgtatcatacctctcaacaggtcactgttttccctaataataacccctttggacaatcagtcacctggcttatgctcatctatatttagatttggataatagaaatacttccagcagctgcctctggcatcctgagtcgagtgctatcagaacccccccagcactggacattcttggttagaatgccagctgaccacctaggttgtggtatcacaaacataatatcacatggcatatgttgaagtattttaggtacattttagacatcataaccacacagttggcagactttagttttgcggactaaattaggcaggagaaatcgcttttctatttttttaaaaatgaatttgttgccaactacagtaagaaagggagctttttcataaagattccaatgtttggcttttttgggaaaactgggatatccagcaatcctgggtctacatttctctatggcaactttcttctggtgccaagcagcaggggcctgccttggaccttggtgggagggtgctgacagtgggctccagggcttcacacagggcccagcactcctaaagtctcccgtcacagagactgagcatcaagggcccttgtcactgagactgtagctgttgtttttcaggaccctcttttctccattgtattcctgcctggctgctgtaggtgttttgagtttttgacccttgcagctgtcagtttttcttcttggctccacacttgtgctttgctcatgccgtttctttgtctggaatttgtttcctgttggacttgctcatccaagtcttcacctcatcttgaaggctggctccaagacccactttggagatagtcttctatgaccattatggttatagctcctctgcttctacacagacaatatagtatttgattttatacatcttatcctacttaggtgggaatattcttttttttttttttctgagacgggctcactctgttgcctagactggagtgcagtggcatgatcatggcttactgcgtcctcgacctcctgggctcaagcgattctcccatttcatcctcctgagtagctgaaattacagttgcatgccaccgcacccacctaatgaactatcatgcccgacaaatattgttgaagtcaagaaacatgtcttctcctattttatctctgccactgtaaaatatttatgcttatcccctcagcctgcttgccttgcttatgaaaaggcagtgagtagcttatcgatctacctaacagttgttataaagaatagtcatacatggtaaaaaaaaaaatgagtcttataaatatgaaagtaatatagaaattgaggctcggcatggtggctcatgcttataattccagcacgttgggaggctgagacaggaggatcgcttgagctcaacagtttgagaacaccttgggcaacatagagagaccccatatctacaaaaaataaaaataaattagatgggcatggtagcacatgcctgtagtcatagctgcttgggaggctgaggtaggaggatcgcttgagcatgggaggttgaggctgcagtgagccatgatcatgccactatgttccaccttgggcgacagagcgagactctgtttcaaaaaaataaaataaataaataaaaataggcctaaataagaagcccaataaggcccagaaagtttaagtccctttcgggagtcatacagttgggtaatagtctagccttaggcctaatcactgttaacactcagatcttgcccattagtcctgtaatgtttcctagtagatctgccactctccaaatcagataaccatacctgcagatcctcctcaaggcttagtagcattcacacatcaaaactagaccatgaccaatgttactgaaatcaaattacgcaaaggtgatgaatgcacatcaaattactcaccaagagccagggtgccggagatgctgtgtcattaacaaggtcatgcagaaagccttctgctggtgcacctgttcagcatggagggttgatgtacctagacgacaaagcatcatgtgcaagggcaatgctggtgaggccaaggaggtgatgggatcagggaataaaaagtaagtcattcagtaggctggagcttactgtctgaatctgagagtagtgatataggtttacgtgttatgctgaaggattttgactttttcctgaggggacagggagccttgaaagacttttttttttttttgagacaaagtcttgctctcttgccaggccagagtggagtggcatgatctcagctcactgcaacctccgcctcctgggttcaagcgattcccccgcctcagcctccagagttgctgggactacaggcgcgtgccaccaggcccagctgattttttgtatttttttagtagagatggggtttcaccatgttggcctggatggtcttgaactcctgacctcgtgatccacttgcattggcctcccaaagtgctggggttacaggcatgagccaccgctcctgtcctgaaagtcttttaaggagggctcaggcctgtgacatagaaaggcctggttgctggagcctggatctggggaaagaagggagatgggaacttaggaggctgctgcagaaatcttagcaagaagtagtggtggattaaatgaaggcagtggctgtggaggagcaaagaagtggatggattcagaaggtcttagaccctttttgttattaggatgacagcattatttgttgttgttgttgtttttcttaaagcagcatttacccatatcctccagttattcctggaggcagggagatggactggctaactttatgtgtagcctttgattctgtgtttctagagaaatgtctgtggttttgtacccaagtgaatctggctgcattccctttggctgtatagatgtaccccttaggaaacaaggacagcttttcactgttacagttctgccaccttgttctaactgtcatatgcaagctatctcaatataatataccaattttttgtgtatataacataagcacactatgtactttgctcaaaatgttctgttactgagtacatataatctgtatacacatcagccgtacataggagcaaattgtatatttcttctgtagtcatagagggagtagatattaggattgttgttttctgctcctgaaatttttgttctgagttttaaagacatttagccatctgtttatgactttaaagtgagtgttcaaagtggaggctctgaatgtatgtatcattacagatatattgaaagggtattgtcaataataaatggctactatacatctttttcggctgttttctaactttttaaaatgtgtaatgtaagcaggtagtatttttaaggaagtggaaatatatctaatgttaactatggatttttacctggattatgtcttttaggaagagactttagggtgcagagttgcttcaattgcatttaaaataatcaatttttccttaaagcagcttttacctgtatccttaatttatagatgatatgtatttatttcatattatattataaaatcattttaataaaaatgaaatgttggattcatcgttgaacttctttttagaaatataaattaagttgaaattagtagctttcaaagttttatcatatatattttttccagcagatatagtagatgcttacaaatattttaattcacctaactcttctctaagagaatgaattgtatcttctcccacccacaggagactgactggttccagagatttcttttcacaagacttcagttttctggctgcagtataagaattaaaagggctttagagttggaaacatatatgcatattaagttatttagcagtttaaacatatatacttttattcaatatgaacatgagagtagcagttggaacaaagactccatttgtcaattttcattccttttatttgtagttgaaatcctgttgggagtatgagtaaatttaaatataaataaaatgcaacattcaatgtatttctactcaggaaaccagttacaatgttattaagttacaattgcataaactaaccttataggcctacagcaaatgctaatacattttgaccttggtttgtacttgagggtgttttttggtaattgctgtcaccctgacagccaacaagggggactcgcaaaggaaaagcgtatgagagcgatttgcaggggctcagactgcacattgcgctgtggtgttttgatgtgttgcctacctgtttttattactacccaccagctcgctatcaagtagtccttgacctggctatcattgataggtacactagtcttgagtaattggtactttaacttatcaactacttttaaccactgtgtaaaaatgaaagcaagaatagtacgttaataattgccaggcattcccttctgtactgtacatacaaatagaatttttacacatgtgcctgtatgtatatataggttgagtatccctaaatcagaatatgtgaaatctcaaatgttccaaattctgaaactttttgaatgtgaggtgacattcaaaggaaatgttcacgggtacatttcagatttctggttttcgaatgaggggtacttaactagtttagtatataatgcaagtattttaaaatgagaaaaaatccaaaatctaaaacatttctggtcgcaagcatttccggatgctcaatctgtacagtatgcctaattaattcatcttcttataaaattaacttctatatataatgagttaaagttaagaaaaatattatttacttgtacaatccattgcctctgtacttatgaaaattgtccagaaaatcagtctttgctgactaagcttttttgcatatggacatactcgggcatgttggctttatatatcttatctttatatacctcagctaaaagctaacaccctttatatttaatttggtatgctaagcttttggaccggcaggcttgtggcccattaccagcgatggtattctccaaggtgtaggggatagcagagggcaggtcttccttttttttcctgagagagcaccgtagacatgtttggaatagttcatcaccactgtaaagctcacaaagaagagacatgctcaaaaaatcacaatttataagcaataatgtcttacataaaataaaggtgatttttttttccctttcagattttggggtaagtgcgttcctagcaacagggggtgatgttacccgaaataaagtaagaaaaacattcgttggcaccccatgttggatggctcctgaagtcatggaacaggtaaaaaaacaaaaaaagtgactttttgatggacatagtacaatcgtacagatcattaatatgctaacatttcatttgtatctagcattttagtagaatgcataatgtaactaagatttaattctcaattgctagctaattagcaaactaacgtgaaagttatacatcaacagctgtggatttctgacatgacatggacttgatgatgtgtaacatgcctgctgtatgattgtgtttttttcctgctttctttcttaggtgagaggctatgacttcaaggctgacatgtggagttttggaataactgccattgaattagcaacaggagcagcgccttatcacaaatatcctcccatgaaagtaattacaattggaaatactacatcggggttgaaatgtgattggacggaatctgttttctaattctcttcaacatcttcattcttctcttagacccgaggagaattaatggaggaacgcagccaagttgaacattgtctgattttctcagtggacagaataggacaaaagtagcataattcccagctttgaagcttgctttatagtctcagcacagagttaagaaaataatgttatcagattggttgatggaggttgatagctatgacaaatgctggtcattactcttttgatagcagaacaacgccaggttcccagagaatatctcaaaatagattatagtgatgtcatctctgcaaatgggtttcccagattttcagagcttttttttttctttctttttaagtggactacaacatttttacccctgctcttatagtgtaatgttggcaactgatctgatataagtgagccacagtgtttttaggatgctattttcacgtttctgctcttcttttaactggtttatacctcattatttctcttagttctgagatagtggtatcagggcttatttacccaactggattttgttttgaggctgaaatagtttagtgaaattataatgctattttacatagagtatggtctatgattgtttcatggttactggaaaaatttgggaggatttattttaaaaacccaagaataaaaagtgagttttactgattaaaagaagtagtatactcatattgtagaaagtttggatgtgcaactcagactaaagaagaaaaacaatcatccgtaatctcatcaaccagacaatctctactaaggtttcagtgtaattcattttattgtttttatatatatatatataaattttttttaacatagttaggattttagtgtatttgtgtgtgtgtgggtacatataccggattttgctagcagaaaatttaaaattgaagcgtaaacaattgaagtgacctcttggagaaaaagcactgaagtaatgctgaaggattttttcttttattcagtttttctttcttcattttctttcttttgcctcttctcagtgtttcccacctgaattcaaagtcgcacttgcttgtcccagcctgacgtcctctaggacttttcttcagagttcccagtctcccgctttctcctgtgggctattatcctccacaaacaataagccgtcactttcacgcttcatctattcacacatctgaaagtgtttgaaaagaggcttgacatgtatagcatttgcataaattaaggctgaattatgcattaatgagttttattgattgtacaggctagtagttttctacactttccactttttttttaaagcaaatacttttgaagttagtatgaaagagtggaatttttaccgttttgatttaaagttgtattttattttgttttgtccccctccgaaagcagcaaggactttggatttgatgacagtttttagcaactcagttatattctggctatccttcagtgtcctgctctctcagctttgccaagccttttagcaattttctgtatgttttctcatttttttaaaggaaatcatgttacctcctgggatgttgtggttttatttttagggctagtaatgtgttacagaagccttgagtacaggcagttccttacttatgaatgacctgtatacatgaacagtcactgcctcgctggccctctctcttctcctccacccgctttcccaactagcctgtgctggagctacgtgctcctcaaggcagtacacgagccagttcccagaaagctctgtccgggatcattcttaacacatagagcaagttttgtaagttctgtcaatggaataacaaaaaggttaaagggggcatgaacacatttgcagtggtaatgaatactttaaatacacaatttctgcaaagttaaaatcatgggaaagcactttgtatctaatcaaggatggttttttacacttttatgaaaaattcaaaactagattgtagcaattgctatactgagattctgtcttcatgtttgtttctgctgcaggtgttaatgttgactttgcaaaatgatccacccactttggaaacaggggtagaggataaagaaatgatgaaaaagtacggcaagtcctttagaaaattactttcactgtgtcttcagaaagatccttccaaaaggtaagtgaaacttagtggatgagttaatgacctggtttgagccatgacaaagctttgtttgtagatggggaaaggctttgtgaggacactggaaaggtatttcttgtctgggaaaccctgctgtggtccccagatttccaacctgttagtgaaagacggtgtgggtccaagagggaaagaagtgggtgaagaacgaaggagaggcagaggaaaaattgtggtgttaacaagattcactgtgcttgttaagtgtgggctctgtcatcaaaggaaatgaagtaaaacagaaatcaaaagaaattggcagtgctgcattcagaagctgagctaatattcttcactgtgtaggttgaactgacctctcaggatttgaatatcctgctagctccagtctaaactaggcagagctattgaattttgcatgagcttcctgttagttgcagaacaagttgttggtgctgtttaaaagattatcagtaaagaagattaaggagattttttaccttaaaaagattaatcatgtaaacagaagcaaatggctttaaattaacattagtgtttcctatttattcttgggttattgccctgcactgtagtgtgtctgttttctgagttccttttcttccttcttaatttctgtgactttgaaatatcctggttagtgatcatggagcccactgttctttgtcacctagaggagattgttaattatgtgaatggccttgcctgggtaaggtccctttgtgggttcttggttgtatgtggtgttatcctagcatagaccaggagaggcctctgagaagttcctatctatcctaatccacctgaggatccaatttgatccttatattttaaaacataataactgacttctcttctgaaactttctttttcagggaaggactctgctgttagaaatgattcctttattttgatcttaaatttttatgaaacttgttaagcctttacacagtaacttacagtttgagtaggcaagccttctctagtttaaacacagtttccataattgtacccattctttgtagctgctcacttcattcctttacatttgctgaatttgccttgaatcttttccatatcaatcacttttctcatggagccaggaatgaagactgctattagccatcttgaattatttattgtaaaagggatgattattttgtcatacctgtgtactatttctatgtaaacatctcatttgttatttatatttgattcatagggcttgttttccttccaaaattttttaatctttcattgagattatttcttcaacctccatttgggtgaaatgctcttagattctaattttgttttccaacatttgcttatcttccccttgaatttggtgtcatctccagtaaaattttttgacatcttcaagaaaacagaatttgatccttcatagcccagcaagagaagttcttgtctttccagttagtactaggttattatagatggtcttcctgattcttgaacgacagtaattgagattccacctagtggttgtgatttgtaatgtcacacaattccagttttttaagaaaattgttctgtagggtagaatcgttagtgtacttaatgatataatagtgtatttctttaggagatttgtatgtgatttggtcaaaacaaattagattgacatacattatatttaacaaaccctttttatttcttttcttttttttttttttttgagacggagtcttgctctgtcactgggctagagtgcagtggcgcgatcttggctcactgcaacctctacctcccgggttcaagtgattctcctgcctcactctcccgagtagttgggactacaggcgtgtgtcaccacgccaggctaattttttttgtattttagtagagacggggtttcactctgttggccaagatgatctcgatctcctgacctcgtgattcgcccgccttggcctcccaaagtgctgggattacaggcatgagctaccgcacccggtccatttttatttcttaataatcttgaaagtctttccggattttattcattatatgagcttaaatatcaggttccttctattccaccaaaaaaaaaaaaaatcctttagaagagcgtcatataacatatattcaaaatcttcaaatctttccttcagagaccactctcttaaaaacactgttgatgtacaaagtattaatcttttaaggtcttcttttagatattttctccgtaacttaatttgttctcactattgtgcaattgttctctataccaagcagctatagactgttagtggcacatcaccttcccaggtagctctttcttataatgaaaagacacgtaggttgagtttgcggggggaaaaatctatgcaatgtaagaatggaaaaaagcaacattgttgaattactttttagataggatgcaatttcaacatatgaattcatgactaatttgataagtaaacattgaatttcctgcacaataataaaagaaaccaggaatattttctgcctttgcttttgtcattggagagttcttgcccttcctctgtcccctttctatccctctttttgtgcttggttcagatgccacatcctcctagagttacatacctgtgggtgggattcctagctctactttatcaacatctgcatggcttagctttcttgtctgtacagtgggccttaaaatacccacttcataggatcgctgtgaggatgggaagagagaatgtgctgtgggcacttcaaactcatagcacagtgcccagggagtctctaagtactcacaagattaagattgccattcgttatttgccttttttttttttctgaccaagtggagttgttgaaacttttatgcaataactacagtatgttgaaaatatgtcttttgtagcacttattacactgtgtactcttattgatttacacaccccaattcctcaaaagtttataagtgtttttgggagaacctgtgccacttatccttatatccagtgtctggtttgtattatatactcagtaccatttcttgaacaactggagattgggagcttgcaatttgggggtgatttggacccgttgaagaatgtttcataaacagaaatcagatttgagtaggttgaagagtgaatgcaaaatttttgccaatttttattatttctcttgcctaaatgtagatcatctacctgtaacctgaaagtttactggtgccaaagccctggtattgctgagtacctcatgagcaatgagtgaaaaaatattgcgagaaaacagtgaccaggacagattcactcatatgcatcaactctcaggccgctgagagtaggctgtgtttttttgtcaacgatgagagctcatgggactttcctcataaaagggagctggggtgttgcagacctttggttcgtctgagtctgtgttctgcattgacgtagacagagagttgcttatatttgcataccagaacatcttgctattccttaaaaataaaagagccttaatcttgtagactacatgctttgtatggctagcaactgtaaaaagaaccaacttttttttttttttttgcaacaagggggatgatgttgcattgataaatccttaagaaaggaatatgacttgaatatttcttttgtggggagtggtgtggggaggaaagcagctctgcttgaggtcaaagggctgttggaacttattaatgcaaattgttagaactatttaaactatatcatattcatcttgaatcttttgaaaattattttaagtctcagtggactttggttcatccatatgcattagctgaatcctttaagagattttcttctgagaatgttgttacttgcagactgctgcattgtttttaaggatttaaaattgaatcattgttcaaagcctggaccattattttggttgctggtaacattttagcatttctcataaaactgtttgtacttacattatgctgaattgtttgatgtttgctagtggccatgtaagacgtgactgtgcttgcagaattttcttctgtagtactcagctaaaaggtaggctgtactggtggttccacattagccaggcattggcagttgctatggcataaaataaaaatagataaatgagaaaataaaaaccaaaaaaaccctaaaatcaaatgggcagcaggacctcagcttttctcacacttcctatcactgtcttccctctgtcattttcttttttttttagacagagtctcgctttgtcacccaggctggagtggaatggcatgatctcggctcactgcaacctccgcctcctgggttcaagtgattctcctgcctcagcctcctgagtagctgggattacaggtgcccgccatcacgcctggctaatttttgtatttttaacagagatggggtttcaccatgttggccaggctgttcttgaactcctgacctcaagtgatctggcctcccaaagtgctgggattacaggtgtgagccaccgctcctggcccctctgtcattttcttaatttcttccagttccattctttcattctttctcatggagatagtttggcatatgtaggattttatcccaaagtgataaacacttcagctgatttgagcaaagagaaacctctaatctgctatttagttattctctgtgtaaagttggaattacctattacttaacaattaagccaataaaaaaagaaggcgggttgtttaaaccaattctattttgttaccttattgtgtttttgtacttactgatgaaggctgagagtggagtggagtgcagagaaaggagttttctttgcagcatgcttttcccttttacatttttggttaccatggcaatgaccttgctggagaaggcaaagtattttcccagccccgtatctcaaggtatccctggtacttcccagctttctctctacagcatcctacacttgacccttcctgtgtggggaggaggatttttggtggggggatggtgcagaggagacagggaggcactttgcctccttacgttggcacttcctctgtcctctttttttgctagcacgagtctcattttcattaagtctttctcctgttccccgctgtattgaacagatgcatagattttggtgctaactgaatctagctccaggagttgtagtgctgtgtccaaatgtgtagcagcatcactttcccccatatttgattatagtatgaaattgagctgtagcagtttctgttctgtgctaggtattggaaacatacaaaggaattctatgaggtccctgccttggaagggctcatatcctagtggagtgaggcagggagacataggaacagaaaaatacatgatgggaatgtgggtagcatggtgcatgagtgccactagggagcaatgccttctacttgcaggagctaggagaggtatctttgaagatgacatttaaattggctcttgactgatgagcgagggtgtgccagttggttatgaaaaatttggaagcaagaaaagcagtgtgtgctttgtcacgaaagatcaagagatgagtgagaacatcgttgcagttgaagggtggcatctccggcgggtgtggggagatgaggatggaggagtcagggcctagaatacttgcttctgtctcaggccactgaaatgcatcaggatagataaaagaggatcagattttttttttaagacgctaatttgcgaagcagtggggttggtggatgatgggttggaaatagcaagggagaagtagtgagacactagctgaggggctgttttatttaactatattagccagagatgatgagggcttcaaacagaaccagggccttgagttttttcatcattctgattttcttagggttcttttcacattaaaaaaattaaaatccaagttattttctatgcttcttagtttttaaaatgttgtttcatgttgtgaggttcccaaacatgacattttggtccatttctgagtccaatgtaaagtgtttctactacatgttccctcaggagcccttctccttccaaggtgtttgaatgtgctgctgcccctcttgccgttgagcagcacactgctcttacctgctagattgtgacttgttggaggattatttatgtctgccatcttcattatagtatgcctagcacctagcataatgcctgacaaacagtgggtgcttagttaatatttactgagagagtgaaaggatgaatttggaatagctagaggcaaaaacatctgctggtgatcaggaagagtatacattaaaataacaactaaagttgaatcatttgaaagagttatactgtagtgtttagttctagggcctatttaacaaggtgcagattcatggcctacctgttgtttagacccttagttactcaaagcaattagcaggtagatacggagatccagggttctttgtcatgtacctacccataaccagtgttccacttgaaatctgaggaaaaaagcagtaatgatttacacagaaaatttctttgcacagaaatagtttctggggcccctgtagacttacacagtttgtgtactgatgcacgtaatgacattttctaattctttctatgcttgggtttgatccctgggaatattttagtggagcttcctgattccaaagcagcagtttccaattttgtcaagcatgaggattccttttcaacttgccccgccccaccccctgctacaatattatttgtgcgtttggtaattgttgcctaagataatacctaatgatattcaataatgcatccctcctcctttctctcccaatatcttattatgaaacatttaaaacatatggaaaagatgaaaaagtagtgcattgtttacttctataccatcacccagattaaacaagtattcacattttctataattgtgatatctatgttttatttgctgaactctgaaagtaaaagacttaatactttagcttgcatttcttataaacaaggacatgttcctacacaactacagtaattttccacacctaagaaaatgaagagcacgttcctaaaattatctaatatttagcagattcacacatctctaatgattcccaaatgtcctttatagcctctgtggcttctttctcaagcccaggatccagtccagggctgtgtgttacatttggttttaatgttttgtaaagtctgttgagtctagaacagttccttcagtccccctgaaagagatcaggccagttgtcttgctgagcaaccctatactcccgttatttgattctttctcatggctgcctttttggaaggaactattgatgaaggaagctattctttgtgtaagaatgtcagtcagtaaacaaggaagatagaagtaggaactcagtattctgctacttcctatgaaataactattgaaggcaaagatatgaacacaattagcagaaaggttttcaggaacaggatattcataaaatgtcaaagtattacccaacagaacacttgctaattgcagtgggggaaaacatgacctttgcaagggagagatttggtgcctggggactgatggttaaatttagcatcactaacagtggaatgacctaacaggacctgcctctgaggtgctgctgtaagaagtgtgtgccatcatctatgaagtattcttgccccaaatgcttaattaaatctctttgaagccttcagacctcacttagagtttacaggaaatatgggctagagaagcaagttgaatgacaccatgaggaaataatcacaccatctggtaatgcttctaaatgaatttgcattttattaatcacgatcgcatttaccttcacctggcaaacagcagtccatatgcacttgagacaggtttattgagcaggcaaacagagcgtggacacgatgtgtggaccccttgcagtacctgctgctcttggggaagcatagagcatagtagagtatactttctttgacagggtcatatggtagcttgtatggtttcttaataaatatagaaatttagctcacagatgtgtcagtctgcccccttttagaaacactaaattcacttagttaagtgtaaggatgaaggatggaaaattgattacgccccaagcacttaatgtacaggagtttatgtgttttgcagtagaggtatttggaaagaactggaaaattggcactattttatttggtgccagcctatgattaatttggttcccagttttgctattactaaaattggtcttccagaaatactcttaaggttaagttgtttcatcaaggcagtgcatttattaagtggtcattgtttcaactctaatttattattgatctttcaggcccacagcagcagaacttttaaaatgcaaattcttccagaaagccaaggtaacatgcttaaaaacccaagtaaatctgctatttttgaaatcactgtgtatttatgtgtatcatatttgatgttaaactgttgggaatatttgttttgcagaacagagagtacctgattgagaagctgcttacaagaacaccagacatagcccaaagagccaaaaaggtaagtgccattagccttcatgaccctgtaggaaccaatccccagggaaatgaaacccatagaaaaattggaaaaagatttccacatatgcaggatatactattcagacgctatatctcattagtgattactcagataactgcatttgccttttcgttatctcagctggttgttatacatttgggtgtggaaacaatttgaatctcaaatgatttcatttttccctttatcagctttgcttaaagaaggtcagaaaggaggggatgtgatgaggtttaaatactggagaggtaaaatatccttgaacgtctttcctttgggttttacagaagaggcatgctcactttttagataaagtttgtaacgatgaagataaaaaacacaacttttaatggtttgaatagctgtgagatagcattctttcctcatgaaagacctatggtcccttttttagtttaccttatgttaactgaattatggtaatgattagctgaacaatcttccattttaggttttagatttctaaaatggcatgtatgtatgtatttatttatttatgtatttttccagagacttatttatttgtaattacagatttcattgtggtatgaaacctaatacaatttaacctctggtttggtttagtttggtttttaaattatattagatatttataattaaaaatatgtatatagtcacatattttaaaaaggaggttcttcacccccatttacagttacagagaaagctgacatgaatctgtgttgtctgtgctgtaaataaaaatggcaaagaaatgtgctttagggattgtatctcatcttgccaaggtatacatagctgaatattaaattccagatactgccttttctaaaatattctgtagaaaatgcattagctgatgctttagaattgttttaaacagattttcaagtggactttaagaaatgtcccattctgtgaaggtatctgagcttctctcctggaccagaagaattatgtggggtgggctggtttctgcgctgtggctggggaggattgatgtgttgactttggagatatgagcccagttggtctctgaggggacagggagcgctgagcagacagtccatcagagtggaatatctgaaggggaagcacagaaaagctaaatcttcagtttgagggcaccagagtttgaggactcctatcagaagactgaaagagatgcctggagagattcccaggagtgttggagtctggcgtggggtcttttgatcaagtatttaaaatgtcagccagagttgagaaagctgttcaaaagccattagcttatatagtacatgtcctcaaaggactttttctttttcttatttttgggcccacacttcttttgctggaagtgtcatctgatcccatcctgttagctggtccctgagaggtgttttctaggctgctttctctctgcagctttggcctcacactccagctccttgttaagtggcctgccagcctcgctatcacagtgactccacagggcccaccttccctcccaagcctaaccttcctgtgctctgtatttctttccgagccccccagcctcagaaccctgggactatatgtgagccctccttccctaccttgtcttccccatctaaccactctccacatcttccctatgattccttctgcaattttggttgaaacctttttctccactatttttaactggacaattgcaataaatttctaactgttctccctccattccccgtttctattctttcttaggcatttctaacaagatttaactttctggtcttagttgctcaaaagtggtttccaaaattaaacaaaaacaaccagaagagcaaataaatgaaaaaatagaaatttaaaaaatggttcctgtctaataaagaccaagatccttagcctcgaatttatggcactatttcaacttccagtcttatattctaacctccagccaaactgaaccatctgtgcttcccactgtgtaacccatactttcctttggagctttttgaaatttgaaaaaatgaagaatctgttcaggctgtaaccttcatttctttgaagaaaaaaattacttggccgggtgtggtggctcacacctgtaatcctagtactttgggaggccgaggcaggtgaatcacaaggtcgggagatcgagaccatcccggccaatgtggtgaaaccccatctctactaaaaacacaaaaattagctgggcgtggtggtaggcacctgtagtcccagctactcgggaggctgaggcaggagaatcacttgaaccagggaatcagaggttgcagtgagccgagattgtgccactgcactccagcctagcggcagagcaagaccccgtctcaaaacaacaacaacaacaaacaacaacaaaaaacttattacatattagtgtgctgtgcattccaaaccccagtttgcatctatcttaaacaataagcaactagagtttcgtgagatgtgatttttcaaccatgtcttctgccatttacttgctctttgcttttagatgaacctcaggtcttgttccatcatccatcccttcaaatgcaaggtggccgcacagctcagtgtcacataggagtgaagggagaatgcaaattagttctttaagcatcctagagaaaagagagtggcctgttttgctgttatcctggctctctagtttcataatattggctgttttccgatcataattctaattttaatgagcaattgggttatcagctatactccacccctcacctgtaggttctttgacatactctgcccgggacagcatcgatcatggctcatttctcattcatagtaagtgcccacaaatgtttactgaccaaatgatcacatgccaaggaaaagccctttgaaactgttttccactcatttgaacccccacaatgcttggcatacacgtgttcctaggattcctgttaatagtgggtagtctccccgcaagccccgctctggcttgtgattctgataaacaaccatgatcatccttatgggaaacttcgtgtagacgtggctgctggaaagtaaatgtgattttaatcaccctgtgcaatgaaatgaaaacgtttattgtaggattctctgcttgtcttaggttgttccagtgtttaagtaacttctgtttaagaattggttcaggggagtcgttaatttatttgttcttagactgtcttgattgagatctcagccattctcctcttcactgtggcgcctcccagttgatcttgctctggcttctgtggtatagattgctcctcagaggctactcgttgatgttgatccattgatttttgtcttatcagttcgctgtttttcaaagagaaacagacagtccattgacacatgagtgtttaaatgatacctgggcctgtgggcagggctcttgggcatggaggcaaccatgttgattagaaatttgctgtcataaacagcattctcttctcctctcttctgctaaccaacattaagagataattttcaatgtgcatttttctttaatgtgaacaattttcatatttaaaggagaagaggggctggtattgtggctgttcttagaaagccccatggagcccaccagtgctgccctttagcaggagagaagcagaggcccgtcatactcatgtttggccaaaatgtgatgtttttgttgggagccacataattccacgagggtaggtgatcttgtcttcatccggattgactcctctaaatcacgaaaaaatagaaaatggaaaaagatcgacatggcctctttggtaatttagtatgcaaaacattttttttgggtgtgtggtaattgtagaaactgaggatatttattttcttcctacaggcagaatatttggtccattctgggttcttttgctgacagtgttgtttagggatcatcttgattttctttggctctagtctgaggggcccaggcatgtggtgaagggtaatataagattggatgttcctggacctcaagacactctatatattctaaatgagaacatgctagtaatgacccatgagaacagagctaagtgcagctgtataacttttttttcaagttttcactatctttgtgcatgagaataaaaggctttgtagccatcgctgcctctcctgtgactttctgagggacctgtctccagccatgtcttggggtttgaaagcttaaccacgtggtgttccatcttttactgtactgaattcattaggtggggaagggagtcaatggttcagttaaaattgaatgtagatgcttagggctgtgtgcatcttctttttttttttgattatcaaaatcagttcttattatatccttttctttgtattacagacagtatcttgctatttttacccatgtttcacatcaactcttttgttttattattatactttaagttctgggatacatgtgcagaacgtgcaggtttgttacataggtatacatgtgccatggtggtttgctgcacccatcaacccatcatctacattaggtatttctcctaatgctgtcccttccctagtcccccacccccctacagaccccagtatgtgatgttcccctccctgtctccatgtgttctcattgttcaactcccactcatgagtgaacatgcagtgtttggttttctgttgctgtgttagtttgctgagaatgatggtctcataatctgtgtgcatcttctacaggaacatttaaccctcagaattggctgatgtctaagttttatgttagtgataacatacttgaggcaccacactcacactcatattcatatgctttctgtggctttctaaaaccaacatatgggttgggcgcagtggctcacacctgtaatcccagcactttgggaggccgaggtgggaggatcacttgaggtcaggagttcaagaccagcctggctaacatggtgaaaccctgtctctactaaaaatacaaaattagccaggcgtggtgacacttgcctgtaaacccagctactcgggaggctgagcaggagaatcatttgaatccgggaggcagaggttgcagtgagccaggatcgtgacactgcactctatcctgggcaacagatcgagactccgcctcaaaaaaatagaaataaaaaatataacccacatatggcaggacagagggcaaggggctcgtagctatgcaaatgtctgaatgctcactgctcatccaaaaaacatattggccataggagggaatgaagaggaaacatgtaataggcagttctttcccttcttatggttgcctgtgttttcactggaagtagatttactggagggttattgcttgaactttcttaatcatgaaattaagtaagcaattaactaaacagtacaatgtttagtcattatcagaaggaggtaaagggtatcacatcgctgctgtctttggatggaaccgctgtgaagtggaaagactgggatgttatttgtgggtcccagaatttctaatattaggctatgagattggtttcatgccaaggccccaaggcccttggccccactggatccactgatatgcttaggaatcagtgggtaggaatatttcaattcacatttatttaatacttacaagtgttgagaacttgtcctgtttgtttttaacttttttttttttttttttgagatggaatctcgctcttttgcccaggctggatgaagtgcaatggcgtgatctccactcactgcaacctccgcttcccaggttcaagcgattctcctgcctcagcctcctgagtagctgggattacaggtgcccgccaccatgcccggctaatttttatatttttagaagagacgggatttcaccatgttggccaggctctcttgaactcctgaccttaagtgatcctctgacctgggcctctaaaagtgctgggattacaggcatgagccattggtgcctggcttgtttttactttttcttatgaaataatttcagacttacaaaaaagttagaaaaatagtgccaagaattttcgtatgtgttttctcttactctttattttgaaacattccacagtaggttgcagacagaatgccctttacctctaaatatacttcactgtatatttcctaaaaacaaggatactctcttacctagcaacagtacagttttcaaaattaggaaaagaacatcgatgtaatactattattttttagatcttatttgaattttgctacatttgccaattttcccattcatgtcatgtatctggtccaggattcagttcagaattattgagttgttacacctcctgtagtctcttttaatctagaacagtgtttcttttcccatctgtgactcctttgaagagtataggccagttattttatagaatgtccctccgtttaggtctgtgtgatatttctgaatgatcagattcagtttatgcactctttgatagacatacctcagaagtgatgttgggttcttctctgtatcatattaagaggcacatggtattgatttattcctttactggcaacgttcactttgatcatatgcataaggtgggaccttccagtttctttattgtaaacacaagtatcacttcttaataggatggatttatttacattcactgattacattaaacattaaaagataaagtgaatatatttactgtattgaatcattaatcttttttcaaggaaacatttatactttatgtcatggctctacattcataggctattaatgaggaattttattgatagatagaatgatagaaatcttgtgtataaaaacaccttgttggctgagtgtggtggctcacacttgtaatcccagcacttagagaggctgagatgggaggattgctagaacccaggagtttaacaccagcctgtgcaacatggcaagattctgtctctacaaaaaaaaaatttagctgggcatggtggtgtgtgcctgtgcttccagttacacaggaggctgagttgggaggattgatggagcccaggaggttgaaattgcagtaagccatagtcacaccactgtactccagcctgggtaacagagcaagaccctatctcaaacaaaatcaaacccaaaatgacagtacactggataaagaaaatgtggtacatatacactatggaatactacacagccataaaaaagaacaagatcatgtcctttgcagcaacatggatggaggtggagaccattatcctaagcaaactagcacaagaacagaaaaccaaatgccgcatgttctcacttataagtaggaattaagcactgagtaaacatggacacaaagaagggaacaatagacatgagggcctacttgagggtggaggatagcaagagggtgagaatcgaaaaacaacttactgggcaccacacttattacctgggtgatgaaataatctgtacaccaaaccgccacaacacgtaatttacctgtaaaacaaaccttcacatgtgcccctgaaacgaaaataaaaattttacaaaaaccaaaacaatacaaaccactttgctagcagatttaggcaggaagtggaggtgcacctgctgccccagtctctatgcctggtctggaaacagcaagagctatatctgtatcttttgttgggtgagctgcctaatctctctgagcctaacctgtaaggcagagctgacaatacttacattgtgttgctgtgaggatgagagatgatctgtgcaggatgtctggtgccgtgtttgacacatagcaggtgctcagtcagcagtggcagtgtgattgtcatgtaaataaggagaatgattattgtggctacggaagactggacattttagaagtatgtagtgaaatcaggagtgaagagagtgtcctgtaggtggggtggggtgcagatgggtattgaaggttgtttctgcattgccgttaatttgggtgaaatggaggaaaagcctatggatgcctacagaaagaaggaaaataattacagtagttagttcattgccattgcctattcacctgtcttcatgttttcttttccgatccatcaaggtgctggcagtgggtgagaaccagggctttctttcactacagtaaaccctccctgccctgagaaggggcgtgtatgtgtgaagagcctaagagtagtgagaattaaatacaaacacagccaatattctttcacagctttcagatcactttcatttatgcttccatatttgtcccaaacaattgttcttgaagacaggtagagcaggtgttactgtcacactttacagatggaaatgtgagaggtgaaaaggacctgcccaaagtcacatggccaaataagcaggagtgaactccagttcttattctcaatctatgctctttccaccaaatcatacctcagaatgaagaagaagagaacggagaggacaggaaggaaatatagatggagaaggtaggcagagttaagtggtgtacacaggaaaatgggagcgtatttgtcattctcagagtgagtcggccaccatttaaattgtgtgaggaggatgtctgtgctattcacaggcactaggagatgctacaggcactaggagatgctgcaggcatcattgcaggaatctgggaagtttgccagggttctagcaagtgtagagggaaggaggtgacaaaaaggctttggagattatgttggggagagagatggctagtgagagtttggttagcatcaacagttgttagataccgtcagaagctcagcttctcactcatgaagtggtaatggtaataatagctatgtttgggaggactaaattaggtaatacataatataatagtggttgggacaaaataataagtggcacaggttatagcaaaattttttaataatcacatatattgcttttattactatagttattatagtccagattgtttttgtaacatttatgattgctgccacagctgtgggcacccctgctgctgttcccatttctgctgctgctagaacagctgtttccattacaaccactgctaccagtagtgggcactcaggtgcacatgatacaaggacatagcacagacagtgaaactcacctttctgtgaagaacgcacaaacgtcacaagacatgcaaaactcaaagagtaatagagaataagcgctttggtatgtgggcatagcatctgtgctacagctacgggaaaggtcatgaagctggtagatgggggacatgtgaagggggaagagagaaaaacgatatttattgtgcacctttatgcatcctgctagatgcttacgtcacatttatctcaattactgcagccatacaacaatcagtaaagttctgagtataagatatgttaaataggttaggccagaggataagatacattagactattaagaatgatttttaaaaagctataaatattttgaaataccaacagaaaaggaaaaaccatctattaaaagtgagttaagctatccctaaagggttacaggattttaaaattgagaaccacaaatatctcctagttttccatgcttctgtgtacaggcctgaaaattaaggcctaaggaggtcgagccttaaccaaggccaactgcatcatcatgtcctaacagtccaaagccagtatcccagtttgttaccatttagtttcttcttttagtcgataaagagggaaaattaccctgagtttctacagaattgcttttttcccctcctggaatcttataattaacttataaaatatcgaaggttatgcattatcattaaagcagagaagagagagtgatttcaaatgcttgatggaatgatgttagttttgttccaagttttcccagtagagggcagcaatgggttttaagtctgtgccattgtggaaagctaactgagcaaaagttttggctttgtcgaaggcctcagacttggagttgagggatcaaaggggtgttaggtccctactgagccatgaacaagagacaccttagtcaattagggtgctactttactgggcaggagattgaagggtgatggtttaacgacttttcactattactatttttaagttatattttctattagcaaatcaaagcaatctaccatttgcattttacataattcgtgtcagaaacaaacatctcaattttgaagatgggattggagagcttccagtattttgtggtctcaagctatttttagaaaattctttggtttctgcagttctccttagagcttggtaaatacgggtagaagagagtcaacatgtacaataataacagtgaaggagaagtggacccacttccgcagttaccgtgcatattatgggtttaatataaaatactcccagtgatccacatcggcctgagtgcacatgtcctctctccactttgtgtttccttttcccatcctctcgcttaaaaccgaccatgtgccttgggaataaatctcattgaggaactcacatgctcacagggaggagggcaagggtggttgaggatattatttttcctattttagagctgagagaacagtaggccagagaggttaaagttactgatttcactggggctgttacagggacaggcgttcacagagtgtgagctcattggtgttttcactgcttttttattttaaattctttgctttttagttatttgagaactgagagttcctttggtcagaaaagagcttttggtcactagggggtgctattagaacagttcattgactaagaatctggacaggaattgcttaccagtctgtaaaaagccttgcagccgtagattttttccttttgctctgtgtctgtggcttgactggtgttcgcactgggggtgaattaggcagaggtgagggtagaggaaagagcaagggggaaaagcatcttacagagttactttcaattcatttggtgaattgagttgttgtttttttttttttttttttttgaaagcatatgttctgggaaagtgactcctttctggttgcctttgactgggagctgagaggatccactctggaaattgtaatttgctgatccccatttagggagaatgtctttatttttagattgatcttgaaagacagtgagctgtgtaaactttcacagacttggaggtccagttttggatatttagaaataatgacacatactctgaaattattgtaagagatactgtttctacaaatttagtttgtagaaaactaattgttactggaaatcacatccagttagatttgtgaggtctggatagtcttcaaacatattatgtgcttcctttttgcctttgggaaatttgctaacttttcccaaaagcttgcgtgcatgagctagcttttctggaactgaagtggcgtgttacttgctgagagaagctcccgactgcctcctcctcctcctccatctgtccatgcagtgctccccgagcatcctggtaacctactaggtgctgaccttccctacggtaggtggcctttattcagcctctcagctccctctaatcctagtgtaccatttctttcctttcttccgaaaggaaaataatttggctagagttgcggaaaaactaatataaaatattgtcagtaaatgcccttttgatcttgtcaaaactctactatagttgtactgtcttttctccctgattgaaaactcaatggcttcttgtcattaataggataagatacaagttcccgccacttataagatgaggtgcacatcacttggaggtaagggatcactccagggtcccatggtctatgtctccaggctttctctcagccacgggccacctcggccttcaacacatctttaccaaattagatgtgtttggtaattgtacttttctaccagtacactcctgaaatccccacatgcaccatgaaggcctctccctacacttgtatctctcccagcctagcatcttttctgtgaagctttctgatactaccctcccagcaccccaggaggttcatcagtctgttctctgtactactccttaccttgagcttaaatatgttgttgcacttggtgtcatttatagcttactttctgctagttttaccttctgtagcctactatcaattcttgtggagcatggatggtgtccttttatctctgtgttctcagtacccaacatagtattttggtcaattagtaactatttttcaaattgaagtttagcaagcaagatggtgatgaggatcgtcttcatgggagctggtgtgagagtgcaaggggaggtagaggaaatctgcttttagttttaaagaagaatagttaagatatttttcagctggtgctgtattcttgtatttgaagtctgggactcagggtttagccgaacctaaatttaaaatcaactttgttagcaccaacttgttgagagtcttgagtgagccattaacttgattcacctttgccacatgatcatagaatggaatggttagatattattaggtaataattgtgaattatgcactttgtattatttgacaacaaaaatgtagtccctaccactcagcatatattgactattgtcattttcttctctgagccaggatgcacatacgttttcctgttacctgaagctgcatttaattaggaagatattccaaaaatagctttaaattaggttttagtacgctccacttttggattaccttttacttatttcctcacttaggagaaataatttaaactttttatatcatgatcctgcaagtctttaaaatgagtaagatgttttggagtagggaaggtgaaggaaatggaaagtaatggcacttttatgcatcacggggaaaggaagggttctatcatctgtgggaggaaggcaaatgtttgcccctctgccctggcctcttaggttgtggtcattcaatcacagggaatgtggagaggccagcagggggtgtggtacatatgtttgagacatcattgttgggggtcgggagtctgcttgttttaggctaatcaaacttgattgacttaacaaagattcagggctctatttattttaaaaggccagaaataccttgtttttaaaaatatatttttttactttgaaatccagtagttctaaaacaaattaaaattcaagggactcgattaaggttgcactttgatatagaattttctaagctttccattgaattacttctgacacattcaaataccgatttagaagagtgtctaatgacttttaattttgttcttcacatatagacatatacaaaattaaggcgcccttgtacaactttcacagcaatcatagagctgggaaatgcaaacagtagcctttaatttaacccagattgaaaaggccagttgaagttgttttgggtgaggggtgggctttctctgtgactttgtggaaagctgtgagaggcagatgaaggagagaaaggctcaggagtagctcttggtcaggaagctgggaccataaaaatctatgcttgaaggttaagaccaagctttggctcttgagatagactccagccagccctggctctacgacccactcatggggtaaccttgagtggcagctgagctccccagtgccttgtctgtgacatggagactgttcagtggcttcttgttcttcttgggcaaaaactaaaatctttaaccggggttccagtgcttcgcatggtctagtcccttcttcgctcttcagccttgtcttgcattctccaccctcagttctctattgtccacttgcccatagcccttgtccatgttgctcttccccctggaagtgtcagctcttctcatcctgagcagacctcagtttcagctcaaagagtcatttctccagaaaacaaagttggaatcatgccatatttattgtcctgcaatctacctgcaatttcatttaagatatacctttggacatctttttatgtcaacaaacatagattagcgtaatcaaatggctgcatgaaattctgcaagaatgactataattaagaatcaattttttcttgataaatactagattgttgccaatttagaaatcgttaaccacactgggatgaacatcattgtacttgcattattacatagatgttacctattttgttagtctatttcctaggaacaggattgcttggtcaaagagtatatggtttataattattgacacatatcaccttacatatgtttaaagtgggaggtgttatgtttcaaatcccagcctgagtctcaggtccatcatctgtagaacattacttatgtatacacccatgcacatgggtgcatgcgtatatatgcttaattcagtgcctagcatatggtatttaatattatttatttttggcattggaatgttatccatgaacatttactttatttcattttttttcctagatctacagttagctgttttgtagagagaattccagatcttctggtggttctgcaaccttgagactttcagtactttaggagagattagattatacgaggtacttcaggctaattgacctagagcctattatgtagatcccagcttagggtcctgaactcttggggccattaaagttagttaggagagagccattggtagtaaaacgtattgaagccgttttgttctgcagtctgttcttggacacagaccgagtgtgcagtgttacaaggtgttttgcccattactctgtcactgtaatctcttctgtccagaacaaacaagtgataaaccagctgcctgcctgaaagtaagaccacgccgttttcatcatcccctggcttctggttgtagatgcttgttatgaggtccgatgtcagccattcatgcggtgccaggtgttggtcatgaccagtgcctacactcaaggatagcactgcagtttccataatcctatgatcttaaccattcataacttttagagttgagaaccctatttttcttttttcctgaaccattgcattgtttttaaaaagaacgtataaccttgagattacagcctcactggccctgggctggttttgaacctcatgtaatcacatggcttctctgagcctcgatttccccaccttcccaacctccaagggtttttatgaagttgaaatgtgacagtttatgtaaaacacttatgcagattataacagagattctaaaaatgctttttttgccttcttctcccttccctcattgtgcgtcagggaacattttgtaaggaaggagttgtgtattatacaagtgagcataaggaagtatttaaatgtcatgtgagaattgtcttttattttcttaaggaaattattgtctaaggttagtgaatttcatcctgctctttcgttcttccttcctgtctctgtagagcacaataacccaacagctacaacctcatgctttagataaaactgttcttgctcttctgccaacatacacagtcctagaagtttccttaaggactctgaattactgaagcttacttggaactctaccatttatttttgttttaattgtatgatttctgatttcttaatttactgatgaatttttaagttgaaattagaaagttagcctattgagtgtattttttaaacagttacaatgaatgcatctgtttgaacaaagtaaacatttttggtaataaatgacatctgaatcagctcgtcttcctctgacgttttctgtgatatgttatttctatggggtctctcctgcttttctctttaccttatcaagagatatttgcctgtcccccttttcctgacagaagcttcatgcctagttcagtggttctgaaacttactgtgagatacctgggccctttaaccagacattcacattctacaggtctggggacaggattcaggactctgcatttttaataagcaagccaagtgagagtggtgcgagtgactgagacagcctctgtgtcttgtctccttgttggagaggaagccatattgctaagttcactttacaaaaagaaaaatctggtagtcctgccatgtgattatatagctttaacaaaaatgcctatatttcacaagctactttcctctctttgcccactggcccacctcactgtcatttataattctcttttttcactctgaatgtcactggagcagcccttcctagttgttgcatgtaatatgtatcttatctggtaatattccatgtgtcttcgctgtgttacactgtgtgaaacagagctgcaatatttatctgcttaaacaatggcttcttttggtattgtttgataggtcttatattcattattaaagtgggcatatctgtctccagagagctctgactttactagcattattaatgtggcactcatttaccattgacattgtgctcctttctttgatgtataatagagggggggatgtgacattctagcttgtggaggaggcaagatggatgaattagcctttgacatatcctggtatggacatagaatggtgtggagagtttctatttagacaatggagaagagggctgggaaacagtttagggctcattttataggagagtttctaatcatggaagccgggcaaagatgaaatagactggaactgcaatcataaaggatctctagaactggaagataccctatttgtcctttcaaccagagcttcccacccagtggccagagcacactggtggacggtgagtaggtatagtgagccaggagagtaatcccctgatccctcagggcagctggatgaggcctgggatgaatgacattctggggccagttgctgtgaatcacttcatcatttgattctagtatgttgtataaatatcattttctatgtgcgccatgaggtagacaaaggttgtaaaacaatggtccaaaccgctggtattaaaattctgtgaaccattaaaaaaatcttactggaagttcaaaattttgaatataggggttgtattagtttgttttcatactgctataaagaactacctgagactgggtaatttataaagaaaagaggtttaactgactcacagttccacatggctggggaggcctcaggaaacttaaaatcatggtggaaggtgaaggggaagcaagacgcatcttacatggcagcaggagagagagagaagggagaagagctacacacttaatcaaacaactagatattgtgagaactgtgtcatgagaacagcatgggggaaaccacccccatgatccaatcacccccaaccagccccctccgctgacccgtggagattacaattcaagatgagatttgagtggggctgcagagccaaaccacatgaggggtttttgaagaaccttaggagtcccaagagtccagtgtgaagaccactgctctgaacctgtcctcttggagtagagaggagatactgagttctgtagagattgaatggatttttaataggtgactaagatctggatttccacttttggctcctggttcagtgtttttttttttttctttaaatgttgcttaagctgaaactagatgataaaaataagaattaatggattgtaagttaaagagcagggaccatcctaattggtcctcgctcttcaatgcttaacatggtgtatgccaaaatagttgctgagtagttgtaggtcaggtaaaatgactgtgatgggacttattctgtccatactgggaggttgggccagatgtgtttcaagcttcctccaataaagatccagtgaggtttttatatttatcagtatttagatggagggtgggcaggtttttttctgtggaaattgagaatagcaaaagctcttacattgcatatcacatttaagcttccaagagccttaggaagtacagaggaattgaaaagtggaatacaaattgatattgcaaacttttctttgaatttataaggagaaaattgctgtatttgtaatgaattttgcttgttttagactatttttcccctcgctgtatacatgtgagaactaaaataagttgggtcattttatcaacagcacagaaataaagagaagatcctaaaatcagctagagaagtaaaacagatcacctatcaggtaataataactagactgacagcaggtatctgagtagcaacaaccagtggctgaaaacagaggaataacttgatatcctcaaagtattgggaaaaagttaaaattttcaagattgaggatagtgaaaagacattttcagattaacaaaactgagaaaatttatatttaatgggcctgtattaaaataactttcaggaagatggaaaatgaaaattaacaagctaaacatctaacttgaattagaaaagaacaatcttaatctgaagaaagtggaaggaagttgataaaggtatgaataacaaaaattagtgaaatttcaaacaacaaccaaaaggatattgcaaataaattatagcttcaacagagatttttagaaccctataatgaactatgaattactgtatgccaaatgtctagacaagatggataaattttaagaaaaatataacttaccaaaactgagacaagtgaaaaaatagaaagatgagtagtcctataagaccaggtttttattatttgtagtttttattaaataaatctaacaaaaggtatataagaattttaggcagaaaaagtataaaatttattggaagacattgaagaaaacctaataaataacagaaaaactttgctcatggataagaagactcaatataggaaggacaccatttatccccaaattgattgatagagtcaatgctgttccaaattagactttccacaaaggtttttgagaaactcaacaagctgattctaaaatttatttgaagattttaggctcaagaatatacagtgtaactcaataaaacattgtgacattagggatagacaaatgataaagggaatcaaataaagaacccagaagtagaccctcaggtataaggaaaacttgatgtatgacagggatgtattatagatctgtgtggaaaaaagaaggaactattctgttaagtaatagttccgagatgagatatacaatctatatgaaaaataattattggcaaggcacagtgactcatgcctttagtcctagcactttgggaggctaaggcaggaggatctcttgaggccaggagtttgaaactaccctgggcaacatagcgagaccgcatctctacaaaaaataaaaataaaaaattagccaggcatggtggcatatccttatggtcctagctactgggaaggctgaggaaggaggattgcttgagtccaggagttttaggttacagtaagatctgattgtaccactacactgcagcctgggtgacagagcaagaccttgtcttcaaaaataaataaacaaaaataaataaatattttaatctcacagcatacatacatataacttcattcctaacagattagacacttaatgtaacaggcaaaactttaaatcgtttagataaagaaaacctattgctttggagctcagatatttttaaataagagtcaaagggtctatctataaaagaaaagactgttaaagtgacacgcattgaaattaaggacaactgtttatcagaggataccgttaatgtaatagaaagacaaacctcaaactgggaaaagacatttttaaggcatacagccaacaaatgattggcatctgaaataaagaacttcttcaaatcagtagaaaaatgaacataaacacacaaaaaacaggtacttccctgaggaagaaatatgaatggctcaggattatatcaaaggatgtgcagcatcattagtatttaagaaaatgtatatcagaaaacatgttccattttacccctaattgatcagcaaaaattaagaggcctggtaataccatattttggtcaggatgtagacttgtcacatctcttataacagctggtagtagtgaaaactggcaaaactggcacaaccaatttggacaagaatgtggcaccttcctgtaaaagttatttctgtatcctgtagccccacaattttacgcttcgagaatccatatccagagaaacttttgcacaccatgccagcagatgtttgcaataattttcaaaacaacaatgtataaactcaagaaaatagcccagaggagaatgagtaaatgctgtctatccacacattagagtatcatacagcagcgaaaatgaacagcatagatgactttcagaaatgtaatactgagtgaaaaagagcaaactatagaagactgtagtcagagtgatactatttttgtaaagctaaaaaataacactaagtgatgtcctattttaggatatacatttgagatgatattttttaaaagcaggtaaatgataaacacaaaattcatggtagtgactgaggctagggtatgtgccatgtagcaatattttaagttgggtgttattgttccagttcattacttacatatataaatatatgttgtttgtatatgttgaatattacatcgcaacaacatgaagagtcagacttccaaggttccagtcatgacactctgttcagtagaggttcaacaaagggcaaggtacctaacctcttcaaagctcagtttcctcaactgaaaagtagggtggtaacagtacctacacattgagttgttacgactattaaatgggacactccacaaggattaagttagtgcctagtacactaaatttacagtgcagcaaatttagcttttgttgtctttttcttaaagcatgaagtgtgatggtttgtacttcccttggaattaaagtagatagtgttcctatgcaaaatgcacttctaaactgatgatatgttagaaatgaggtgttggcaagatgaattgaaatatgcgtgaatattgcttatcgattcattgagaagggttagtgagtttagtacagatttcttacctatgacagaccaaacaagaggcctgctgaaggggggaatgacctttatggactccatgtctgtgaaattctggaacattagcaaaagtaccccatcgtttctttttttttttattttcttttcttttttaaattttgagacagggtctcgctccgtcacccaggttggagtgcagtggtgcagtcatggctcactgcactcttgacctcccagtctcaagtgatcctgccacctcagcctcccaggtagctaggactacaggtgcatgccactacgcccggctaatttttgtattttttgtagaaacagggtttcgccatgttgcccaggctgatcttgaactcccgggctcaagcgatcttcccattccaagtgctgggattacaggcatcattcactgtacccagcctatgttgtttcttgcctgcagtgagagaacactggagaaaggcagtttttcaaaagtttgtcacaagttggtataccgtcgagtcaagacatctcccaaactgtgctcttgacatagaggtaatcacaattacagcagttatgctttaggcttaataaccccagaaaacattttagaaagcttgttgttccagtatacaatttagaatgtcatacatattctgtagtaagtagaattttgccagggtttttgaaacagttgttttggaattaggatgagaacatttaaaatttggttggcttggaaatgatttgaccatacacgttgagaatcactaactggattcctcggtaaatgccattagtgatgcgaaagcaggtgtccgtataaagtgagtgattcttgagctctttacccaaagtttaggacactataaacatttttcacatgtgttgtcagaggacacagtcactatgaacagtgttacagtagctattaccacttggtgaattaatagggaatgtgaaaatgagtaaattttcccataatgtcccagagtttgggtcatattcccatgcattttcattttactcttcagtgtacctgtgaagcagagaaaaggctggctatttatggggtggtctgtgtcttacaaagttaaatagatgtgaaatgatatttttaacgtcaaataatgagtcagtccagacttcctttatgtgatggcaattccctgataagagatatttgagctaattccatatttaagtgctttacagaggatggcaaacagaaatggtgcttgtcatgcactaaatataattatcctaacatcttttaggagaggtattttcttctttcaagaaggcacgtgacaagtgaggttagacatccttctgggaaactccaaattcccaaacctttcaaagtatttccctgcatcaaggtgtgttacagaaaagtcctctaattcaagactaaaggtttttataagacccattcatcatgttgtgaagttattcgtatgggaattaggaccagaagaaagcaaagttgagaatatttgagaataacacctgaggataaaatcgcagtcaccttctgactttcgatttaatagctatgaagttaaccaatgattactttaaaagcaggaagtattttgtaagcagtgccattaatgctaagtagatgtttgttgtaaaataaccgagatgattttttaaatttaaaattacgtgacatgaagcaaccacccttctccaggagactagtctgttataaaaatagcaatcttcaaaacattttttgattaacaagttttgcttgaatgagttttatattatgtattccctgtagttctagattatatccacatactatatatacacataatacatacatacgtatttatgtagacatatatgtatgcctacataaatgttttttctttgagacaggttctcactttgtaacccaggctggagtgcagtggtgtgaacatggctcactgcagccttgacttcctgggctcaaaccacccttccacctcagtctccagagtagctgagactacagatgcgcaccaccacgcccagctaattttttggtacattttgtagagatggggtttctctatgttgcccaggctgttctccaactactgagctcaagcgatcctcctgccttggcctcccaaagtgctgggattataggtaatgagccactgtgcccagcctggattatatttgaagctgtaccccacatgtaactaatatagtacataatctgttcttttaaattttagttttaatatatgtatatatagccaataggagaagaggtatgaataatagctataacagtaacacaagtaataacaataattattaagtttaaactaagtcaaagattgcgccaagtgcttgatcaatatcttttcattgaatcatcacagaatccctataaggtagatactgttatatctcagaattgcagatgagaaaactgaggtgcataaaatgtaagtaatttatccagaggctcacatctggtaagtgttagagcagggatttgtacagaagcagttgttgcaatcttgcctcctgactgagtatcattactttaaaaacatactggagtcaattagctgcgcatggtggtgcgcatctgtagtcccagctactcaggaggctgaggcaggagaatcatttgcatctgggaggcggagtttgcagtgagctgagattgcgccactgcactccagtctggcgacagagcaaggcttcgtttcaaaatgtatatgtaggagtcatgatgtattcctgttttcagggtttgtacactaggactgcaaggtaaccctgccttaaatgaaaccctcattgttctttaaggaacacaagagttcttatcttgaatttcagtgctaaagtgaagttctggaataaatatagcccttcagtagggcacagccaatttcatttctcccagaattggagtcatttttcacacaaggtcttgcccttttggttattaatcctgaaactctggctttaaaaatctcaattaaatgtgcatgcaatccttctaaaatacacaattggtatttcctatggatataagcttctttaagaaatggtgtttgcttatttaacattttccctttaattttccagggtgtacagctgcaccttgtccgcctgagcttgcatttgaaattgactttcgagcccaggctccctttcacaaggccctttcttcctatgccaattagataacatcacactgtgggaattttctgaagtgggccccctgaaacaagggagcctgcctttcagattgtgtctgatctacagactttgttattttatcaaatgacttccagttacctgcatggtctggagcttgttctgagtttgttgatcattgagttattttgtccctaagagagcgcaggccttttgttcccagtgaagattaggttggaggagagtgtggagaagctgtgaagttcatcagactgagtatggtggactgagttctctttcattctcatactaacaaactttcaggcaaaagctagaggttataaaaaaagaagtgctttgaaaattcaacctgcctaaccactgtcaggatcacctttttgaaattgttcttcacatgttgtttatctgctcaaatatgaacacacagtcttagtatttattcattttaactccaaaaggtaatgtactgtgcagttctttgtcttgctttttttccactgattatatttccacatctgtacatgatttcctcattcctttttgttactacctaatgtactactgggtaggatatactataatttatttaacctgtcccttgttggacatctaggtgtttccaaatgtttgcaattacaaacaattgcttcattaattattcttgtgtatgtgtcattttgcatgtgtttagctttttcaaactggaaatgcaaggtcaaagggtatatacatttgtaatttgggtagatactggcaaattgtcttccagaatgtcatggtttttaaaaccctcatctcttactactcaccaatcagaatggtaagcttcagctacaatgaagccctaattagtggccctggaaaacatgatgtagatttttacccctacactcattttctgaaaatattctttcgttccattccattctataccttctatcctacccacccctaagcatgtgcaggtgaacacacatacatacacacatgtaactccccctatgggctcacaccttcacagttcctgttgcttttcttttctgaatttttgtggtgtattcacactgtactcactttgacaatcttatactacttgcaataatgatttctttggcaatgtctttttctcgttgtgagttcctgcttgatgactaggccagtgttttgcatgttgtgggattttttttcctaatgattagaggaaaatagatttattcttctggtaaaaataatacttattatgagaaaaaatcaactggtaaataaaagtgctcagatatgtaaaccttccctcaaatactgccatccaggaataattactcttagtgtttcattacacatcctttcagccatctctttatgaatgtatgtacatatatatccccagataggtgtgcacagttttacacgtgaccttatactattctgactattgggtaccttgcttttcttagacctttccccatgtcggctggtgtggttttatataattcttaatggctatatggtagctgtttctatgcacataccatagttcaaccagtgctgaactgattgacatttgtggtttatagttttttgtctgagtgaatacaacttttggcattagtgcctaactctttagataagttaaagtcttagaaatgaaagaactgttttaaagtgtggatacacagattgtgagatctaaataagtaattatgaaagagaagaaagtttacagaaatgttgagcctttttcttaggaagctgtcaaattcaaattggtattcatagcctccggtaccaaccactcagccatcaaaaagtgttgagaaatcttacacatatataaaagaaaaaaaatgttaaagagatagtctaagagaaataacctttccatgtattcatgaatgtgcaaagaatcattgctttcttcctttatcctgctgggccctaactatctttctctttccccaaattattttggaacgcttgtgtaatttagaatataaaagcattttccctcctactaaggtacaaagaagggcaatgttttctgtttcttggagaatagtttgcttaggaaaatacacagtctaatgaaagggtccgcagctgtgggctattttgaagcctacttgaaaacattttgatgtgtttatttctttactactctatttcagaaaagattcgagatggcttacaaagatgcaaacagtgtagctgggtaaaatttatttgataaatgcaaaaaggaaggtaaaggaacataaggataagaaagtaaatagaaagccaggagtgagattagtttacgaaatacacatgaaacatgaaattgtcatcatcagcagtccagaatgcttgaatatgggtgattttttctggtgcagccaaaatattaagttcagtatacttgctcaaggtagacctcagatgtgaccctgagccagtgtgacagggatgtagcctcatcatccctgtgattggaacacaaacctacacagaaggagtccaaatagtcctcatattgaatccaaagagaaaattcacccagagaagagatttttttttttttttttttttttttttgagacggattctcgctctgtcgcccaggctggagtgcagtggtgcaatctcggctcactacaagctccgcctcccaggttcatgccattctcctgcctcagcctcccgagtagctgggactacaggtgcccaccaccacacagactaattttttttgtatttttagtagagacggggtttcaccgtgttagccaggaaggtctcaatctccttacctcataatctgcccgccttggcctcccaaagtgctgggattacaggcgtgagccaccgcacctggctgagaagagatttttaaacagtataaattcatggtcccagaatgtcatagctggaagaatcttgaagggctggcttgtacagccttctcagaatttgtgagaccttgtagttgtgcattgaaatgggctctggagagtgcagaatctgcatatgacttttatctttaatcagtcactgaacctttccaatccagtttccttgtatacccaacaggaatacggattggtttttacctcataagatcatgcaagggagggaaatgcaaatgaaaatcacaacaggatactacctcatacccgctaggatggcactaataaaaaagatggacaaaagcaagtgttgctgaggatgtggaagaactggaaccctcccatgctggtgggagtataaaatggtgcagccactttggaagacagtctggcatttcctcagaaggttagcatatggcccagaaattctacttctaggtacaaatggaagagaaatgagaaggttatgtccattaaaaaaaaaaaagtgtacatgaatgttcaaggcagtattatccatagtagcccaaagtggacacaacccaactgtcatcaactaatgaatggaaagaaagacccatattggatgattccgtttatgtgaaatacccaaaacaggcaaatccatagagatagaagtagattaatggttgcctagggctggtgggtagggggaaattggggcataactgctaatggggataggagtttctttttggggtgacagcaatgttctaaaattgattgtggtgatggttgcacaattctgtgaatatactaacaattgacattcccattttacatagttgagttttacggtggattatctctcaataaaaatgtatatattttattttaatttttttgtttttattttttttgagacagagtcttgctcggttgcccaggctggagtgcagtggcatgatctcggccccctgcagcctctgcctcccaggttcaagcaattaatgtgtcccagcctccagagtagctgggactataggtgcacgccaccatgcctggctaatttttgtatgtttagtagagatggggtttcaccatgttggccagtctggtcttgaactcttggcctcaagtgatccacctgcctcatcctcccaaagtgctgggattacaggtgtgagccacagcgcctggccaatgtatatattttttaaaaacatagcacagttcttagtgtagtgcagtaagtagtataccaagtaagctctcaaatgtaggctttttctttttctttttattatactttaagttctgggatacatgtacagaacgtgcagatttgttacataggtatacatgtgccatggtggtttgctgcacccatcaacccatcatctacattaggtatttctcctaatgctatccctccccttgcccctaacccccgacaagccctggtgtgtgatgttcccctccctgtgtccaagtgttctcattgttcaactcccacttatgagtgagaacctgcagtgtttggttttctgttcctgtgttagtttgctgagaatgatggtttccagcttcatctgtgtcgctgcaaaggacatgaactcattcctttttatggctgcatagtattccatggtgtatatgtgccacattttctttaaccagtctgtcattgatgggcatttgggttggttccaagtctttgctattgtgaatagtgccacaataaacatacatgtgcatgtgtctttatagtagtatgatttataatcctttgggtatatacccagtaatgggattgctgggtcaaattgtgtttctggttctagatccttgaggaatcaccacactgtcttccacaatgcttgaactaatttacactcccaccaacagtgtaaaagagttcctacttctccacatcctctccagcattaagttttttgtagattctggatattagccctttgtcagatggatagattgcaaaaattttctcccattctgtaggttgcctattcactctgatgctagtttcttttcccatgcagaagctctttagtttaattagacaaatgaaaaggctgagtgaggtgactcacacctgtaatccctacactttgggaggccgtggcaggaggatcgcttgagcccaggagttcgagaccagcctgggtaacatagcccaggcctcatctttaaaactaactaactaaataaataaataaatgaagacactgaggctcagagaggtaaaatgacgtatcctgatcatgtggttacctttggctaaactagaacccagatcccctgcagtctaaatctgcacgctctcccccagcagcacagttacaaaggctggcaaggcatctacttttttttcgaatgtgaccctccatcgttttgactttgattggccttcctttggtcttgagcctttctgctgtaatgattttcaagtttcccaattgtgagtgcaatataaaccttgaaatagtctgcaaaacttgtaattagccatgataaactgtatgaaaaattgattcgtggccctgcctgctattgacttttgagatacttattagcccagctaagaattacccaggcattttgcttttttcctttttttccccatgtggcctgtctttggccctttgactttcaaattgttccacttgaaataggctggacagatgggtctccatttcaaaagcaatggagactcttgtctcttgagttttctcagtagcaagcctggcataactttttgaaattgcattgttgctatgaagtgaaatttgggtctcctattatggtttttttctggtatgtttttgttatgctgctaaaaacatgcttttttgttcactgcacatgggcattgccaaattattgtgacatgaagaaattctgaaggtcagtatcaacctggtattctcaattcagtgaaactgacaagattttgtataacttgaattatattaattttctctaaactggtgttaagaagtgtatgaattgtcacaacctgaaaaacatgtatgtttaacttacattgtcaaaagtttggtcccctataggtacagctgaggttattgacaaatactatggtaaaatttaagctttctgataattagatgtcaggaatacccaggtttccagaatagctttcttttcttagaagtagttagggaatgaagccataggactcttcttgggaccataaaagtagccacttggtaataaacattaataaaaagctaacaaagaagttaactcttcaacctaacaaccccttttgtgtttggattggtgatttcgctctctagatgttaagaaacactctgatgtattagttcactattgatgatcattatctattgctgcataatgaatcaccccatcacttattggcttagctcagcaacagccattttattattgtctctcttggttctggggcttggctgggctgagctgggcagcctttgcatgggctctctcatggcgttgtacctgtgagtgactggtggcttctcaaggcttgccactcacatggctggaggcaattgtagatagccatttgctgggacctcaactgagatgtcagctggacacctacacctgacctctccacatgatctctcctccttacagtgtagtcactggattccaagagtgagcttcctaaggagaccaggcaatgctctatggcctggtatgacggagccttggaagccacgtagctccacttctggtgttgttacaggcttcgccagattggcggggagggaacaataggttctacccatcagtagtagagtgtcaatgatattaatacattgttggaagagtgtgtgagatgggattttttttttattattttgaaaaacacaatcttatgccgtcactttttgacttaaaggcaatgttaggaagaggagacaagaaaagaaaggaggaaaggagccccagagtttggtagcagagtgacaacagtcagctgcagatggcaaaaatgggagcagaaaataaaagcaggggatagcacagttcagatggaggtgtgggagaggcaggacaagcagcccctgtcaatagggtgtcacggatgcttattgggctgcacttgacattgtggctttgaccgtatcccagtcaggcatacgtggtgcaataactgatcacgttcagcatctgggaggcagtggggccgctcttttgttgctgtaagaagctggccagggtagcatatggtaaagtgcaataggtataaaaccaccttgtgatacggatttctcatcttcctttagagggaagtaaaggacgctagtataaaatgattgtgctgaccttgaaggagaatatgggcacttgcagttgtcttctctcacccccttcccatgcaacagatatttgattattaaaagtacatgtgcacttgattttaaaaatcctcaaatatttcttgggtgccgaaaatatgctaggcactagctaggcgctattccagattgcatatttgactaaagaagaatgataaagaagagtaaatctagtgattacttagtattgttttacacagttgtttcacttaccccatatgatttctaagaaagggttagtgttcgtttgctatgaggcttctagaaaatcatttagcttctattagactctgttttacagactctatctgtaataccaatttgtgtggctcttgtaaaattaaaagcacacaggaagtatttaataactgctaaatatttttaccttttagttcctttaaaggctgtgattcagtcaaatgttctataacaatcacatgatatacttggataaattcaagcatgtaatagttgattccgtttattccactagtcttcttcgtcttcttttttttttttttgtttttgagacaggattttgctctgtcacgcaggctggaatgcagtggcatgatcatagctcactgaagcgtgcactcctggcctcaagggatcctcccacctgagccttctgagtaactgggactacaggcatgcaccatcatgcacggctaattatgtgtgtgggatggggtgtggggggagatgaggtctggctgtgttgctcaggtgtgtctcaatctccttgcctcaagccattctcctgcctcatcctcccaaagtactgggattacaggtgtgaaccaccatgcccagccattctactagtctcagttgaacacctggaatgggccagttagtgagccaggtgctggggattcagggatgagcaagtcagataaagtcctcccctgtagaacctaaatgaggtgggctcctccatgaaaaggtgtggcaatgcctaagacttggtaaaatggatacatgaacaaatacagtcaactgtgcatttgcacaaggggcactttacataccacatctgtctgaaatattaaaggatttgagtgactaaaaaacagccatgatgtagtagaactctggcattttcaaagcagtcatctccaagtgtggtgtattgcctgaattgtttcagagtgttggtaaaagtgatatacttggtggtacttgccaactttaaccctgggttgtgctaggaaatgaagtttagtaggacaaggacccatagtagtatgtgttaagaaagggccatagaacagtaaattaatagcgttttcttctctcccctatagtattttgggcacgtttatacccattgaaaggcaggtttttttttctatgcttattgatttagcctatctatttataacagtataattcagaatataaatatggaacaagtttcataaggaagtttatctttaactcagacattatatcattaatacttcaaatctcattataccattatgacctgaatgctacatttttcttcctgtatggagagcttagggaaaaattgtggcctgatgtcttcatccattcacttatcatagagtacataatgatctcaaatatccaaaaatggttatattcagctgcatatttctaagaaaataggtaggtccacagcaggttcttaaattccacatacttgggtgtaggacacagggattcattccctgagagtttttgaagctgaggagacacctgggttttgtttttccagggtagaattcagtacaaatcagcaattgttgaacacatactaagttgtgggtactggactgtttcacccacatgatctcatttatctgcataataacctgatgaggtaggtattatcaccgtgtgttacaggtgaagagactgagacttcgtggttaagtcatgatgactagcaagcagtcaggttggaacttagtgtcaaagtctcatgcagaggccttttgttggtaaacactgtgctgtactgtcacccagtggaaggattctaatcacatccttgttctagtctttattttctaaattctctgtaataaacacgaatcaattttaaattgaaaaaaaaatctcagccaatataacttaaaataggtaatgcagttagattgcaaaaacatatatttgtgtgtgtggtatgaaaatataaaactacatgaacctgaacactgtaaccctatgtttagcaattatatagatattataattaatgctttttaaaatgcaataggcatatggatattaaggtttctgcttcagttatttttcttgggaaaataacacctattgatttaagatccttagtcccagattctaaattgattttcttatttcattgtcaacataattggggatttgtctttcaacaaaagaaaagcaaagcatagtcgtcatcttggtagacatttatgtatataggaaggtcataggtgatttctgaggaagtttggtgattaaagaaagagataccctgtagtcccagctacccgggaggctgaagcaggataatggcgtgaacccaggaggcggagcttgcagtgagctgagatcgcgccactgcactccagcctgggcgacagagcaagactccgtcttaaaaaaaaaaaaaaaaaaaaagaaagagatacacgagtggctagcagattcagcgcaggcttttgatgatagtggggatttgagtgttcttttcttcctttttttccccttcaatgccacaattttatttgtgattgaaggggaaaaaaagtgttctgggagactaattgtagatcattgaatcagagaattgaagattgttctttagacctctttggaggtctttccttagtgagtgttgggtagaactcagaaatctgcatttttaacacatgacctaggtgaattttatgatcaagcatatttgagaactgggctagaataaagcttgcatgaaaaaatgcagtaggaagttaggttgtaaagctggatcgagtccagagtgtggaagccttagatcttaagccatggggttgggatgcggtgctgtgagctgtaaggagcccatgacaggtgccttgtaggcagagaagcaactgtagaagttggctcaggagtgaacagtagaggacagtttgaaggaggagatcaggctggaagaagctgttaaagacagctaggcctgaggtgatgggggtctgtactagaactgtggcagaggcataggacaggggacaagtgacattgaagtgctagacttggcatagcctagtaagtgattggacatggaaggcaaaacagaagggggaagacaactggaaggatttgaggcagtatgaataggaggatggtagtaccttttctgaaactggtgggaactggagggggcctggtttgcagggaagatcaggagttcattaggacgcatttgagttggaagttccattgggatttccgtttgaaggtgtcttctcaatggaggtgattgtggaagccatgtaataagattgccacagaggacatgacagagagaacaaaggagccctggggagtcctgggggaacagtcacaggaacaagtggaggatgcagagaactatgagaggaggaaaagaaagtgctgtcccaggaaccaggaaggtgaaggtggtcagcagttctgaatgctgcagagaggtgaaggaaaatgaagactcacaaaaggacattggatttagcttgtttttcatagtaagagaaaaagttggacagtcagaattaatgagtgaatggatgaagaagtgcaagtgggtgatttttcaaagtttggttgtaaagggcaggaagacacacatagcttgggatgtgcagaggcttctgaggtcagtggagacctgtgtctattcaaaagttcagtgtggagggggagaaaaatattgaaaatgcacaaagacaacttttcatttggtgcacatttattgttcatatatcaagtaccaggactgtgtcgaggctacagagataagactcactctgtaagtaacccaagagaagaatgaaagttggcagtgtgaatttgagcctggatgactgggagggtagtggtccccacagatcaggggaggacttggcctggaaacaaccactgagcatcaggatgaatgctgggttggaatggcgcacagcatgctggggagggctggggaggaccctgtgaaggacttggtcctatagttgtcctgtgtaagatatgtggtagtcttccttccctagaggcaaggaggcccatctcaggtggagggaccagcatgggcaagtacttgcaaatgtgttggagagtaattgtttgtgtgattgaaatagagggaagatatgcagaggtgggcaggagccagagcaaaaagtgtccctgtgtcttgatgaggagattgggctttccccccaccacccacaaatgaggagctgtgataagaatttcagtagagacatgcagcgaccagtttgcctttagagagagctctgaggcagcagtgtggcagtgtgttgtggtttagagggataagactggaagcaggggtcaggttggtggactggtagttggcagactgtgctgtgcaagtgaggataggtgggaacaaaggcagagcaggcagagaataggtagaagagatatttaggaggcagggttgacatgacttatggtttggctgtgtccccacccaaatctcatcttgaattgtagctcccataatccatggggacccgttgggaggtagttgaatcatgggggcgggttttcccatgctgttcttgtgacagtgaataagtctcatgagatctgatggttttataaagggcagttcccttgcacatgctcatgtgcctgctgccatgtaagatgttgctttagctcctcccacgccttctgccatgattgtgaggcctccctagccatgtgaaactgtgagtccattaaacctctttttctttatgagttacccagtcttgggtatttcttcatagcagtatgagaatggactagtacagcttaggtcttgaaaggttttcatgggaatgggagtttgagaagatggtgaaggataaggagagctttatggaaaagctcagactgactccctgctttctgacttacagactgtttggaagatgggaggaaacatttcctgggaaagatgctgaacattctgaatgtgttgagcgagagattcttgcagggcttccagggggagatgcacaggagaccaatatgcatgtctgcaaatcacaggagagggtggcctggagagagaaacatgtgtgtccaaccacgggagtgacagctgagaacattgtgtgcgaaagattccgtaccctgggagtgcgtagcctgcacacagcctcttaactcaagaactgattctcttccgtgttctgaattttctgagtgccttttgcccttctgcttttagccatctacaatgcggccattggactcttattgggattaggtagaaaaagaaaaaaaaatgatggtactcaaatatacctagttttactaacgatgagcagatgtgatgagaggattagatccttagataaagaagcttaggtcctgcagtgtgacctgggttacttgtgaaactcagtttttctcaatacctgttctcctctatcttaccatggattctgaagcttgaattttttaaacggtattttatctttattcactgtgtgagaatatacatatacagctatgttatttcttgtttgtttttaaaatcagtggctggcccttgttaggaaaatagatgaattagaatacatagtctttgagaaccatttacaggtaaatctgtgttatttattttgctgctctagcagtcttctgttagtatgaaatgaattaacaagatagaatttatggccctttttagtattgaatttgatcacagttgagacattgcccctgagataaaactcctgtctggagcatttttacagtggagcttccattattgctttccttgaggactgagaattgtcctgatgatgtaaggaacaggtgtctgatccctgtgaagatggtgttctctgttagcaataggaaaacactgacgttcctactctgtccttttggctgaaacagcagcatctaaatcggagcttgtttaagtggatatgatggctctaagagagaccctgacaacaatggttatagatttcagagtgtggaccacatttggattttggggggatccagttttgaataagtaaactgaaaaagtcatttttgagacagtaggacaaaattgaacgtagactgatattagattctaaggaattattggtgattttgttctttgggaaaatgatattgtgatcatgtttttaaatgtccttatcagagaagcatactgaagtatttacaggtaaaatgataccatgtttgggatttagtttaaaaatactgaagcaaaagagttggaatgtatagataaaatcagattggcaaaatgttgataatgttgaaggtgagtaaaagaggtttgttatcctattttcaccttatgcatttatgaacattttcattaaaaaaaaggtaacaaaaatgaatgtagtagccaagaagaagagaaagttgaaggtctgtttttctctcattttgacacacaacgtcagcgtgtcacacctgtcagtctttctgcacatagggtgataatctttctgcctttctgacccaataactgaggaatctgacaccacagctaaacagtttgtgtgatgacaacactgtcccaccaggacttggggcagctttctggcagttcctatctcatctccctcagaggctctagcctccaatgggaattcaggggattccttgtctccttatatttttgtgagttttgaatgagagagacatgagaagataacttgggtggagtgagctgtggagatggagtagaagtttaaatgtgaggcatgtttctgcatagggaccttgtgatgcagtcattggctcttctttcctatcaatttaaacttgtgctggaatcagacccttcagtctttcaaaccagagtttaagtctgtgctgtatcatgtgtgtgtgtgtgtgtgtgtgtgtgtgtgtgtgcacctgtttgtgtttctatcctcacatctgaagtctctgccctttgcagacagcatgatagtgaaatgagttgattacaaggggaaaatgattttagtgaaccaacatgggtctgtttgcttctttgaattattcccagcacgataggatgttaatatgtcatctcagaggcagatgggcccatctattttgatcatcagctctgtcattatttggcgtttagaaccatgcctttcctcgcagtatcttcaagatacttagaggaaggcccagagttttcttgacaccagctgctactttgcttaagcagatggaataaattaagcccctcagcctccctatactcatcactattaaccacatccccacagcgaaaaggccggtgatggcaaaagatggttgttttctgaggacatggtaaaatgcctttgagtctcagggtgagactcttggcccagaatgttcctgtgtcttacgttttagcctagggtatttatttgacttgttcaactaatatttctacggtacctgttgtgcactagtagtgtctgtgttgagtgctggttcacagaggtgaacagtttcagagcaaggttttctgttgactgctcgagtttcagttatgttggatatggggaactaaagggtttcagaaactaatggagtcctctttacttttctttttcttcatatcccttcagcagttctaggatacaatgtcactagctcctgacatccctctctaaggggaaagcatgagggaagatggggagaagtttccttgtggtgcaggtttgctctggcaagaccttcttcagggagcagaaaattgttattcattcattcattcattcattcaacaaatgtatctttggtccctactaaatgcaggatactctaaatatagggacacagaacagatgtaactgcatcttactttcgggatacatgctttcccacttccaaattttcttatatgctagaacattttctcaatatctttggaattttgtagcaaatgccaccttaacaaaaacaacagtatccattattctgtagacagaatgtagaagaacacaaactcagctacctcggagaggaatggaaaagcagagtattaataaacatgaactcatatctttacattactatgcattcaaaaacttaatggcagtttcattgaccaaaccaaatagcttattataacagtgagtcttcattccagaatttgttgcataaaaataaaatattagaccaggtgcggtggctcatgcctttgggaggacaaggcaagtgcatcacctgaggtcaggagttcgagaccagcctgaccaacatggagaagccccatctctgctaaaaatacaaagttagctgggcgtggtggcgggcgcctgtaatcccagctactcgggaggctgaggcaggagaattgctaggacctgggaggcggaggttgtggtgagccgagattgcgccattgccctccagcctgggcaacaagagcgaaactgtctcaaagaatacatctattaaaaatgttagaaatcctaagttgttaacatgtattgcaataaatgcaggtgaaaataagttgacattcttgatttgaccatattgtcatgttgaggttttagaaatatttttcattttttagttcttgaaaagttattaggcaacttatccttccattgaaagtcacatctttgtaccttgtttagaaacaggaagtggttacttatactttctgttttatctgcttccatgttgtttgtgttttttaaaagaagtatgtttttaatttttagatacttctgttttgactgacagtgtaactcataatgataaaaattcaaatgatgcaaaacctttactggacgaagaaggcagggagaatgttgcttttccactcctgatgttcctttagcaaaacattctaggacactctttgcctaggaacttacctgattagtgaatttggagggaaaaatcaggcacaaaactgtggccccactccgtcttcctcactttctcctggagctggcctgctcacccagggaggtacccttggtcactgaggaccaccggtgtgagggaggaatgtgctgattaacatcgctggggagccctaggggagtctcttcgaaatctagagatcagtttctcaactgagaaagaaaggctgtttactcagtgtttaagccacaatctcagatatcacctttataagtaataagggtgatttttgatccttttatgcttactggtctgatttctaagttagtttagtgataggaggagagagggttatttattgggcctccttgaagtgtacaacatggtgaaaaagtctccaacccagtaggcattaccacatcctgtaaatgcttcccaaaatgctatgtgcatatacgaacatatctagaaatgtgtatgtgtgcctctcctcattttcttttacacagtggtggatgctgttctctattagccttttctacttgttatattttgatggtctctgatacttgttactggctacatactattccataatatggatttgaattaattttctaaccaggaagaataaaaacatgtttctatttgaaactcacactctgatcaacagtgaggaactgtgaagttctgctgctgggggacaggatagcaactgatttctgtgcctcctttttcacatggaagaggcatatcatgtatatatctctctctatgcaggtgatagacttgacttggtccttgataatagagaccacactgaaaattgactatgtattgacctactttttcagagagcctattgctgccatttatccaggaactgtaagctgagtaatagaccaaatgtatctttagggcagttagtaataatttttatgaaggaacccccttggtagtgacatttaaaagttattctgaaatgtttgcatacatttgtatgttgaaaaaaatcagatatcttagtgaaattagaatattaggaatattttctatattacatcttgtgagtctgaatggagtttccattccacaaaaatcagtgcatttgagtgtctttccaggttttttctcgggtcattaatccctaagcagacgtagttcttgacagaaggttttccaagggggtggtgtcgattatatttcttagacctaacataaatgatgtttaaccagtagctaacccctgatctttatttcaggtgtctttgtaaggtaagaatttagtctctcttaagttatggtaattcatatcatcttagttttcattttttgtcctttcagttcagtttctcttaatatttcacttagagacattaacatattctgttatggggggtattgctcttctgctagctaatttgccttttgtttataaataccgatagtgaggctgctggattttagtgtatcagtcaggcttcaacaggagaaacagaaccagtaggagagacctataaagagatacattgcaaggacttggcttacttgatttatgggggcggtctaggcaagcctaacattcccagggtaggctgtcaggaagagcaagctggagctctagggcacagctaaagctgttgtccccagatggaatttcttcagagaagccttagctcagctctgaaagcttttccacgtattgaatcaggcccacccagattatcaaggataatttccctttacttaaagtcaattatggacttaatcacgtctaacaaatgccttcacagcaatgcctagcttagtgttggagggagtaactgtgggcactagcacagtcaacctgacaactagaactgaccatcgcagtgtgtttctctgttgcttgtcagaaatcttctggttccagccctgcctggagccatatttggttggctgtgtgcttctctttctcttcgccacccctctttcttctgcaggtaagctaactcttaacttattgctgtatcctaagcaacctcgactctgctctggagccaaacatttggtttctgcgttttcctttggtcttacatgatgtgtgttttctcttctgtgctatttgtcttaccaggacagagtgttcctatcgttctctttattagctaaagttacagatcagcttggcaccctttccagcaggagctttagttttcaaagacaatagttacaaaattggattctgctttcgtggctcttagctgttgccattgttctttgttgccctcacttggggaaatgccatattggaggtttgataggactgatgcagaataagaaatctaattgcttctctgtgctttgtgctgcctcctcagaatagttcccttccaacttccagaacattctctttcaagacattgccctttcatgttgggtttccaaagttacagtattccattctcattatctgaagagcaatgtttgtcaaatttgcttctcttcccgttagaaaatattcaggcattataaggaagttgctataaatgtgtctttcaccaaactagctgagtatttttaattatcattattaaattataaagtctttgtttctctagaattttttttctaattgcctatagaactttttcatatcctcattcttttgttctattccttcacattatagaaaaaggaaatgcctaattttagcagaactggtagagctttaaattccaagaagtcaaaaaataaatgttaatgggaatcactgactaaaaggtccaatatttagctcttgccacttgcctatgattaatagaaatgggcatttttcctcttggtaaattttagtgtataataacatagtcagatggagatactttgtaagtgtaaattaaaatctgaatgttcagaggcctggagtatacacaattagaaaacatgacttaaagtgtgtggtagagtctgttatctggtatgacaagggctgccaaatacgacctattaattttcaaagaatcactaagtatacaaaatgaaaacacattcagtaaatcccttatcaccatcgttatcctgatcatccatttctgtgcaacacatcaccctagaccaaatggctgaagacagcagcagtcctttagtaagtctcccagtttctgtgggtcagggattcaggctgttcagcttctagtgtcatgccactgcgccagatggtcaggtcacctgggggctagtctgggctacctcacagcacaggggtctgaaggcagttggaatgcttacatggcacttaaagacttcaaccgttgagtattccagtgagcaagatagatgttgcatcaccttttctgaccttccctcacttctgcctcatttctgttggttataggtaaggcaaaaatccacccagattcaaggagagggcactggactctgtctgttggtagtgaagtggcaagattcttggacatgtggggcaggagatattgtcatgggcatctttggaaaaaacaatttgctatctatctacgctctggccacaacaacttacatctcttccatgtctaaaatatgctcttgagcttttaagactctccaaaagtttcatcctgtggcagctccaggcttaggctcaaaatcatgaccttgtcctctaaatcagatctgggtgcagaggaggctcctcaggactggtgccatgggcacagctccttgatttttcaatcttaaagcctgtgaactaaagagacaaatatctgctggacatacactcaggatgcggcaggaatacacacgtcttaaagatttgcccaaaagggggaaaacgggagcacacaggtccatgggagttctggagtctagccaggcgtgggtggccagctccttgatcagggttctgtccagttttgctgttttctaaggctcttggctcccctctcaagttctgttctttaagccatccttctttttccacaagaaagagtcagtgtttgcagctaaggagccttctcagactgcttcctgccagcaaaagtttaggatctgaaggcctctttttattttgtattctgtttctttttgtctaacttggcagtattttgtagtacgatatcaaaaaaggtagtgggttttctgtgaatcttgttgggttcactccattagtgaagatccatgaccacaagatgctttgtctaccatgggttccctgtgagacagctaaggggcagtgccctgtgattcttggaatccctgttatttaatgcagaggttctgcaacacaaactattaagatcctcagaaggtgttaggtacgtttgaaggtgtctacaaggcaccaccttagacctttctgaattcttaaaaggttgtgcagtttcaccctgggtttgatttttgctctgaaaccatttcttggctcaagaattgtttgatgtgtggagagattgggaatgagaaacaggtttatatttaacagtttattctttagctcatctctctctgctcacatcttataggcagtgagcagaacccaggtgtcactttaagtggctgcctggaaatctctttagatagatcattgagttcattaggtgcatttccgcttcccactttactgtagatgtcagtgttgctaaactctctgtcactgcacaacagggtcctcctttcctctagcttccaggaacatttccctcacttttctttaagccctcactgacaaccttcttaaaacaacagtcatttcattatctcgcactgttgctatgtgtcaggcattcagaaagggcttgtcctgactcggggtctctcgtgcttgctgtcagccatcttggaagcaagtctgattgtcatagggctaattgttgctttaagtcactcagttttagggtgattagttacatgtcagtagtgactggagtgattaacatgctgatttctttcaggcctttgttatcctcaagtcctagcacatcctctgctctgctttcagaaatccagattttctcattctcccttccccccaccatgcccacctgaaagctttccatgttttcccattgtctgaattctaagcctctggctggtgtacaacaggggtgtgaactcacaggccaaatttgtcccaaagacattaatttttaggctgcacagagaaagttttttttttttttaacttgatatgttaacattagaataagtcaagagcattcacataaaaatccaaattatccacttctctagaagaatcagaagatctggctatgctggggctgtctccctgtggcagccgtcagtcaatgctggttgccttcttatggtgggacaggtgctcctcaggtcacccaagtcctcacttggccagcttttcctttgcattttctgcttgcctcctataggcctttgaatttgccttcctgattgtacaagattctttacacaacttttccagccttgctcttagccattttctgaaaccagccccctagatcccagtatcttgtgacccagccacattacatgagtcagtagaatgtgctaagtttttgctttctctgcttgctgggctaatgctctagcagctacccttccatactgtcccttgatagacagtcatcctctcttctgcagattcccatgatttgtatcttttttatagtatttatgtcttttaaaaaaaatttctagcttaaatgtctgtccacctgtctggactgtgaactactccaaggtgtaagattttgttttattcatctttggtctagaacttggtagacgaaggtagtcaataaaactttgttgaccaaatgaagtaagaagtgatttttaaaaaatgtctaaaacaagctctctgccctgaaggagtatacagtttgatatgttatatgtccagtgtaacacaaagtagaatgacatagaggtataggcaaaattccaattggatcgacaaaagcttcttagcttaaaaaaaaaaaaaaaaaggagaatgtggaagggcagatcaggccaaggatgtaggtaatgcatatgggaaatggtagagtcacaaaaatatgtgacatgtacataactggattgtagggtatctaaagagatgtggtagaaaatatataaacaaataaataatttggggctggattataaatagataaatagatttggttgggagaagcattgaggatattcatgataatagcacctgtcatgttttgagtgcttcttatatggcaggcatcatgttaggagcattatatgaccatgcccctggtgaacatgatggcagtgggggttgggatgagattcaaaggcattaactaagacaacactggagaagtgtcagaatgaggctggagatggaggattaacaaatgggttaggggtggcaaactcaactttgaaaaacagataaggtgtttatatccaacagaacacttggaaaacaagactaagaaatgcagtttccaaggatttcaatttagatgaggtcagggaggccatggagaaggtgtgttcactcagggcaacagtgtctagtgagctgagaatgtgtactgggctgggagcagtcacatttatcgtggaggcagagcaaagaacagttggaggacacagaaggacaagagaggtaggaggagaaatattgtggacacagatttggaaagagctaaaggaaaagaatggagttcagcagtgtctacaagacagtgttatggccacagggaagagcattgaattacactattaggaagtcattaaatctcaaagggagagagaatagcattggtggcctagtagggacagataccatttttgcacggtattaaagtgtgaggataagataggatgtgagggccacaattggagactatctttagcaaaacgttgacagtgaaagagaagagtgatggagtaattcttaaggaagaatgaaaatcagtggggtccctggcgctcttttggtagaagtataagagagacttaagcatatttacagatgatgtagaggaggcagggcctggctataagtgtcttgaaggaaggaataagtgaatagatacatgaggagtgctcccagaggcattggtcttgtaaaaagaaggaatccattgtctttgcacacagcagggaaagagggtgagagtgtgaagtttattaggaagataggggctgtgagtatgtgttagtatgtttttgcgctgctgataaagacatacccgagactaggcaatttacaaaagaaatagaggtttaatgggcttatagttccatgtggctagggaggcctcacaatcatggcagaaagcaaggaggaacaagtcacatcttacatggatgtcagtaggcaaagagagcttgtgcaggggaacttctctttttaaaaccatcagatcttgtgagatctattcactgtcatgaggacagtgtaggaaagacttgtccccataattcaattacctcccaccgggttcctcctgtgacatgtgggaactgtgggagttacaattcaagatgagatttgggtgcggacacagccaaaccatatcattctgcccctggcccctcccaaatcgcatgtcctcacatttcagaatcaatcatgccttctgaaatgagtcagaactcatttcagtattaactcaaaagtccacagtccaacatctcatctgagacaaggcaagtcccttccacctatgatcttatagaatcaaaagcaagttagttacttcctagatacagtgggggtacaggaattgggtaaatacagctgttccaaatgggagaaattggccaaaccaaaggggctacaggcctcatccaaatctgaaatccagtgaggcagtcaaatcttaaagctccaaaatgatctcctttgactccatgtctcacatccaggttacgctgatgcaagagatgggttcccatggtcttgtgcacctctgtccctgtggctttgtagggtacagcctccctcccagctgctttcatgggctggcgttgagtgtctgcggcttttccaggcccatggtgcaagctgtaggtggatctaccattctggggtctggaggacatcagccctcttatcatagctccactaggcagtgccccaatagagaccgtgtggggcctctgaccccacatttcccttctgcactggccaagcagaggttcttcatgagagccccacccctgcagcaaattgctgccttgatatccaggtgtttccatatatcctcctaaatctaggcagaggttcccagttcttgacttctgtgcatctacaggctcaacatcatgtggaagctgccaagccttggggtttgcaccctctgaagcaatggcccgaggtgtaccttggctcctttgagtcaagctggagcagtcacagctggagcagctgtgatgctaggcaccaagtccctaaactgcacacaacagagggaccctgggcccagcccaagaaaccatttttttcctgctaaacttccagccctgtgaggggaggggctgccacaaagttctctgtcatgccctggagatgttttccccattgtcttggtgattaacatttttttttttttggagaaggagtctcactctgtcgcccaggctggagtgcagtggtgccatctcggctcactgcaaactccgcctcccaggttcacgtcattctcctgcctcagcctcctgagtagctgggactacaggcacctgccaccacgcccggctaatttttttgtatttttagtggagacggggtttcactgtgttagccaggatggtctcagtctcctgaccttgtgatctgcccacctcggcctcccaaagtgctgggattacaggtgtaagccactgtgccaggctgggattttcttttctgtcacatcgtcaggctgcaaattttccaaacttttatgctgtttcccttttaaaactgaatgcctttaacagcacccaagtcacctcttgaatgctttgctgcttagaaatttcttccaccaaataccctaaatcatctctctcaagttcaaagttctaccaatctgtagggccaaaatgcctccagtctctttgctgaaacataacaagagccacctttgctccattggatggacttgctctcagggtagcagaggaagttattttaagtgattggggctggtgaactgaggccctactgtaagctgcagtagcagagagaggaatggagagttggggatctgactcctgctcttacatctcctagtattgtcacctcccagctgtatgagcttgggccatggacacatgttacatgtgtcacagttttacctctgaaaaatggggcagtacaatcattctcagctcacaagctactatgaagattaaattagttaatacatgtaaaatccgtagaacatagtacctaacattgtatgaataccagctaggggcaaggggctaggctggcaatgagggaaagtgttgtctagcacagtgtttctcaaacttgaatgagaatatgacccctgggggatcttattgaaaaggaagattctgattttgtgggtctagggtgggtcccaagattctgcatttctaacaagctccctcccaggtgctgctgttgccccagtctatgggcttcacttggaggggcagggttgtagcagcactgatgccccatctaggagtggccggtggccatctgtagtggcaccaggcatcatgcgcacttgactggtgctcttcttggctggcagttcaggattagagagtacatgttggggctgatcccagggcttgcttttcaagtgtggattggataggaaggttcatctggccaggggacatggggacattgagtactagtaagtgtagcatctagagtcagctgtgggtgccaggccttgcatgctgaggagtagagccgggagggggctggtggaagagcaggagaggacctaggctggagaggacagtggagccaggcagtaggtgtaggatggaggtgccgagagaggtggtggtcagagaggagcagtgtcagagtataaactatggagacagtaaaatatttattgctaacgtcttactgagtcacatttcgttaatttttcatgatttagaaggctttttgtctgcttggcagtgcctcaagtacatgataaacagcaattaattagaaatattttttatacttctcatcagtagtatgcctggtaacaggaatgtcactatgtgttgctttctgctggtgcagtaggttcttgataggtggacgtgaggctggtgggctccctggatcacttgggtttcgactgtagtcagcatgccatatgttcagcaggtggaggagaggctgagtgcaggattcccaccgaaggggtaaaaatcactccaaggagattcccaaatcccatttccagggagaagttaatgtggcagtgggagaggctagtgggtgctttccttttttttttttttttttggacagatggacatgccagattgagacaaattctactaagttttggtcagtatttctttgggtcagtaaattcttcttttgttcagtagagtgttagaatcacacacctgcatttctgacacatttaggatgctatcgtagaaattttacctggtggttcttcatatccttcctccccattcctgtgtcaggggccaggtgccttctttgagttgcatggggacggtacaactgtatttgcagatttgcagacagctcctgtttagagatgcagcactggagtgacaggtcagaccgctctagggactgttgtccacattgctgccatctcctctctgtggctgctcatcctagccctgcccagtggccacctacatcttgcctggtggccaccagcactggccaggaaccatgcttctcctttgttcatctggctgagcctgccttcttttcttggaatcagaacttgggttcatttatttaacgggttttcattaaaaataacatttagagaaagagaagaaaatataaaacattttctaaccttactactgccaactatgacctgaagaatttgtgagattatgaattcctttaggtatcacttaaactgagcttgtttctctgagaagcaatggattttttaaaatccctgacagagaaaatagagaataaattctttctaccacctcttggctttactaaatgagcaaatcatttagtagaacaagagcaatgtaataatcaatgaaattagaattacaagggtaaataatctccattctcatcgttgggtgtggggaagatggaagcttttctgcactttttttttttttttgaagttttaactttgcaaggtattattcaattcccgaataagaccatttactaaactgtgtgaaacttagatggctctaaaagataaaagttgtttctcatcatccctacaaactccctacaaggatgtaactttgtaaaattgatttcccgtccctttggtagacgtcaatgtcacataaatccaccatgaaacctgggtttcaaattatgctgcaagtttattcctaggagtaagctgaggggacattctcaaagacaagttagtattcttattctagtggcaattttaccaatactattccctacataggtttttgaatgttctttctcttaatttggtcaacatttgtatatttatttgtttaaccaatgtttattgcttaaaggcccatcccaccatttctttcaatgtctagagctataatcctagacattttgttttatctttctctcttccagcaaataaaacaaacagagagagagccagggctctaaaataaaataaaaatgggagaaaatgggccattttattgtttatagttggattctgcttgtggaaatgaaactgacagagcttgtaaacatagagccagagggggaaaggacgtaaactaaattttaggatgttaatctagactctctctggaaaagaagatttccttagtgtaatctcttgggtgagtacttaaagaatactaattcatcagctatccttgggttctacaattttagtaaagacagagttttgttctgtgtctgatagataattttacttgttttctcacttcttagttgacagtatgttttgtaatagatgtggctttaaattcttccttttcaatgtagtcattaacatatgtttctctatgttgctaccaccatgatcagcgttgctaagaaaataattttattgtatatgtcaacagaaaattattttctcttcctttagctatttctgcaagcattaaaatgagcaatctgttctgcaaatgctgaagtgcattttggcattttttctatagtactttgccaacatctataagcaccattaaaatcaccgtcattagaaaagacttttagagcaactcaaaatgcaagcggaagaaatatctgatgccaagcccaaaagaggttttactaagtactatttcaaagataaattagttaaaaagaaaaatttggggggtaggggttggagaaaaaagctttttttaaaaaaaaatgagcataactatttgcaattatgaaaaagtactttgtactttcttgctgactttctatgttggagctcaaatcttctagaccaactggtcaggattacttttacaggttctagatggtaaggccctcaaatcaaagccaacccctagcatgcattttttatgacttcgcattgatctgacatgtatactaaacttaaatatttaaatttaagttctgtgttgtttcccttggttttactgaagctcctgtgatgcaactaaatagtgtctattataaaaagtaggctttcttcacatcatagtctttcagtcttcaaaggacagttttagataacttcttgctggtggttatcgttcagtggcataaggagagtcacatttgagtgggagtctaaggctttgtttcttgccttgctttgccttcattactgtgtgatcttgggtcacgttctgggcctccatctcctcatctgtaaaatgaagaggttggactagattgtctggaagctccctttccacacgaagtttctctgaatccttggaccatggctgttgcattcacatcatgttcatctgctacagtgctttgtttaattacatcttagtaaattttttaagcaaattactttggtctcagaggctcacttcagtcatcctgtccttttaaaagttttgcttttccaaccacaaagacatttgggaaagcttgccctatggattacatctctaccctagctcaaaacaatttgaaataatgaggaagactgattataatctagacactagcatggctgctgattatcaagctgtgttcctagcaatctcacaggtctcataagtgctacaaagtgtgttaagaatggtctggtgctgttttgttttgttcaaataggttgagcagaatcctggggaaataagcataattgtcaggttctgcaagagagtgaggtggcaatagaagggtgtgctttgttgtcttaggtttttagattgccaatacccatggtctagtatgcgtcattaggcttcctgatttctctgcctttgctcagtcagcaggatgttgcttgcatgcgcttccttaggcaatttgatgcctaccacatggccttttgtatatggcaactaataaagtgttaactgaagtaaacatgaaaaatgagcttgatccttaattgcttatatgtgcaatgttcttccaaaatattttgttcttcatgtatatagtaatgcatttcaaaaaacacagcatttttggaaagaggatgagtttgggaacctggaggctgtgtagtctttttggatcttaaccgctagctatccctggattcacagccactcaggttattttcaggttggtgtgtatgccgtataacccaagttgcagcaccagtgaaatggttcacatttgactagtgaagaattgtgtgggcttgttttgattcaggtaagaagagttcctgggtcaagtggtcaccttcataaaaccgaagacggggactgggagtggagtgacgacgagatggatgagaagagcgaagaagggaaagcagctttttctcaggaaaaggtaaatgacatcgttgacgatgagctaatctgtgtaaattttatttttgtgattgtgtgtgtgtatatatattaatggatacataattgttttacagtcacgaagagtaaaagaagaaaatccagaggtgagctgtggctatttatttattattttgccatttcattcctttcttgtggtatcagagtctgatccatttaggggagatgcttcaaaatctcatggagtagaaagaaaaaggaaaggcacgaggactttgcagctcctaattctgtctgagttactttgggctgaataaatcggggcaaattactttgctttctgagcctgtttcctcatctgtcaaatgaggatgatcccagtacttataagaaagtcgccatgagggttggcaaaatcccgtacacaaaaccctccacggaatccttgtcacagactaggtaatccattaattttaactcttaggattactgcctttagaaaacatagtaaccatacaggcaaagtgtcttccatgttttttgtttgcaataaagtagatattaaaatggttagaaactcttggttgagtctgttggtcttggtttttaaatcttccaaataataccttagtaggttaaggagcactcaaaaaattttaacagcttccctttgaggcctggtcatcttttgattaagagatcgtatttgatttacttcctccatttgattaattatcctaatgcctaatgataactgtagttcacaagacctgctaattctcctagaggaaatttgagcatatttaaatagctccaaatattttacagacctagtaattaatgtataccttaataaattctcattaagaaaacaaaatctttggactacaaatgatatccatcccaattttttttaatcagcagacatttccttttgattaaatgtagtacctgtcatcatggagtttgaagtggcagtagccagcctgggtcttgtaaggaggaggacagcagagccacaggccaccctttcttctcctcttctttcctctcatccttctctctccatcttgcatgccatgtggataggcctttcctaggcatttttcagcttgcctgcctccccatggtagctctccttcagattttgttttctcctatgtttatcatttaattcacctctcaatttcatacataaaatataaactttggccaggtgcggtggctcactcctgtaatcccagcgcttttggaggccgagtcgggtggatcacgtgaggtcaggaattcgagaccagccaggctaacatggcgaaaccccgtctctactaaaaatacaaaattagctgggcatggtggcaggcatctgtactcgggaggctgaggcacgagaattgctcgaacccgggaagtggaggttgcagtgagctgagattgtgccactgcactccaacctgggtgacagagccagactgcacctcagaaaaatatatatataagctttgatcagagacctcatccccctttgttaggagcaggggtgatgagccccacgtggaacacattgaccacacagatgttgtgctaagttttcagaatgatcttaaccatgtatcatgaactctatttctccttcctttctctcattttatctaaggtgcagagtctaggcttttctgctatttctaagagtatttcttactaaaagtgtcagttctgctgagaaatataacaacataacatggttaaagtagcatcattgactcacaaaacatttgttgttcaccacaagaaatcttcattggacgatatccattggatcctgccttgctagtaaggctgatgggtgcaggtcataaggatttaggataatctcttactgtgtgcttgttgaaattgctctgatagctgatttgttatttggagaatagcagtatctttttggcaagaatattttctgcacagacaggaagggaaagactatgtagtgtgccgtgagttgatcttcaggcatcagtactgaccttcttaaatgggatatgaaagtcataggtggtttactgcatctagactcatttgatttctcagcaccatatgtctgttaacatattgatttataattaaagaagcatatgaatagaactcttatttctgtgaaaggatacatgtgtttgcatgtaaacacttccaccaaattttaggaataacaggccccacctgctattgcacagcttctcaggctagttttttgacacccattcctttgacagccttgacatttgattatcttgagctgtattaagagatgctacagtgatgcttcctgtgtcctttcagcttttaattaaagtgtccctctgatttgccaactaccccaaactgctttctgtaagcaaagcatgaagtattttatttatctattataaaggaaattaaaaagtgttaaatatgtaactattcagcaaatatgtattatgtccctactatgtgccctgtcttagtaggtttaagggatacgtcagtgagaaatacagagcaaaatccccgtccttgtggagctcacgttcttatgggagtaggtaaacaatatataatagccttaataagtaagtaaattatgtggtttgttacaatggaataggagtgatagaaagaaacagaatgggatgggggcttcagggagtgtggtgggaagttgtaattttagatgagttggtcaggataggccttactgagaagagacatagaataatgatttgaaaaacataggagaatgacatataataaaaactgaaagaccgcttttatcctgctccccttttcacccctgtaactatcactttgttccacagaagtcatcagtttgaacagagttttcttccagaccttttctgtttctttccatactaatatgttcattaaaaaatctagcgtgtcatttttaaaacatgaatggaattacaaaaactagaaaatatttttgcaacttgcttgattgtttttgcaatctttccaccttaggaactatagatctgcctcttttttatttcccagcacatagtattgtattagatgaatgaaaattgtttatttaaccatttccttcttggcgagcacttaggctgctattacaaataccattcccttaacttttttgtgtatgtatttcagggggcacatagataagtaaattataggtacttagaattgtgattgttttatgtgtctgctgattttgaattttttttttttttttttgagatggagtctcactctgttgcccaggctggagtgcagtggcgcaatctcggctctctgcaagctgtgcttcccgggttcacgcctttctcctgcctcagcctctcccagtagctgggactacaggtgcctgccaccatgcctagctaattttttgtatttttagtagagacagggtttcaccgtggtctcgatctcctgacctcgtgatctgccagcctcggcctccagaagtgctgggattacaagcgtgagccactgtgcccggcctgattttgaatttttgtagttgctatcaatagctgtaccaatcagtatatacagcttctgacagtgcaccttatacctgtaaacatctttgagagtgaaaatgcttatctgtgccaaataacacatttaaatgccagagtatttacattttaataagctttttcatgtttgtcattacattgcaattcagttgtttttgactataagccactagaagattgagatagtattttatgaaaaaaatgaaaaacatggaagtttgtgtttcttttgcatctagtagacactatacatgttcactgatgacatgaattgggtatgcactgcaagtcgaatattaaacaagtgcatgagtaggcatatagtatttatgagtaggtcagaagtgattcaagggatcagaagacatataattgaggtgaagttcagaaaagtagctttgttagtaccatgtttagacagagtaaggtgctacagtaaactagggatattttaggaaagcttaatgagtgaggggctatttgacctcctaggaagtatgaggtagaatgaccaagtattacagtattaatcaaagaagactgagaaggccagagtgggatgtttgtcagagggacattgagaagatccacctcatcctgggtcgtatttggagatcctcctaagtccaagagaatttccagtataatctgtaagattttagaattgcattacttatcctggaattcagatctggcttgagattcatagccatcacattgaaaaattggccttgtgttcctaacctgatattttagaaatatcaaagtattaaaaaaaggatgagttcatgtcctttgtagggacatggatgaagctggaaaccatcattctgagcaaactatcgcaaggacagagaaccaaacaccgcatgttctcacttataggtgggaattgaacaatgagaacacttggacacaggatggggaacatcacacactggggcctgtcatggagttgggggaggggggagggatagcattaggagatatacctaatgtaaatgacgagttaatgggtgcagcaaaccaacatggcacatgtatacctatgtaacaaacctgcacgttgtgcacatgtaccctagaacttaaagtataattaaaaaaaaaaaaaagaaatatcgaagtattagtcacccactagtaattaataatttataacaagtagatagctcatccttgtttcatttgtttatcatcatattctacttggttgatggaagccagtgaagactaaatgttattattaataatattaattaaacagatgtttaatctgtgcctgatttccacttggaactgtgttaggcactgtgggaatttcataaaagtaaagacagctcgctagctggatgcttttcatctctttgggggtcggggaaggggtggtatttgcaaggacagtttccttaggtagtgtttcctagcttatatagcgtcttaggttatataaaacttttcaactgttatcccattattgatcttcttttgaccagtggttttggaatctctttttgtcaaaaataataagtacatgttttatgactttctgtcaattttgcattatatcctaattttctacataaaaagtgaaattgactttatctttaaatttatagtttcatttgggttcatttaactgaggagggcatttgctaaggcttctattaaagtaacactcttttttatagtagcatctcagttaggtgacatgaaaataaacagttcacaaccctggctggaaacctttaaaaatgcagtgtctagactcaacccacagattctgatttggtaatttgggatgatgtccaggcaactctgatttttaaaaagctgctctcaggattctgattcacagctaggatcaaggactggctaggaaaactgcacaaatccctcggaatccagaagtccagactggaatccaggaagctggtgtgctcaaaattcctgaagatttgttttaaatgtccatcagaaatttccaaaataaaaataaggaaaaagaaaatgtttcagaaatcccttgggaaagttgtgtttatttaatcaagggtaatgaagcaggtgggaaaggtttctggctgaagcccagtagggctcacaaaaggtatattgaaaagttttgttatcaagaatctagacttggctaattatggaaatatttctgtttcctaattctgggattttgctctgaggagaaaatacatttggtatttaaattgagttaattttattagagattagatgcaatgtgaaaactaatttttttccttatattacttattgctattgtcacatgtcatttaagactgctgttagcttttaaaaattatttctgtgggtcaggcgcagtggctcatgcctgtaatcccagcacttggaggctgaggcgggtggatcacctgaggccaggagttcaagaccagcctggccaacatggtgaaaccctgtctctactaaaaatacaaaaaattagccgagcatggtggtgtgcatctgtaatcccagctactcaggaggctgaggcaggagaatcgcttgaacccaggaggcggaggttgcagtgagctgagatcatgccactgcactccagcctaggtgactgagtgaaactccatctcagaaaaaaaaaatatttctacgaaaacatgttttccaaatgcctgtgagctgtcaaacgtgtttgttctatacccatatggagatggagagagagatttaacttctccctccacttttattatggttatccttagccatcacagactgctttaacctgatattttcatgataccactttctaaaaggtgttgttattgcaggtgactgcccttttgagcagttgttagaaaagataggtatgtttttcagaaatccagaaatctgcaatatatctgaaaatgaacttttgattttggaataattttcgatttatagaaacgttgcagggacagtgcagagttcccatatattcctcatgcaatctcccccactgttgatttcttatgtattcctgacaaatttgttacaactcagaaaccagcgctgccatgtgactgtcaactaagccccagaatttgttcccatgtcactagtttgcctactagtgtcccttgtttttgccaggatccaatccaggatagcacattgcatttagctataatatttgcgaaaacaggaaaggagttcattaggcagagctctacgaaaaattggaaagcagatgttgtctctttcttgtctccattctgagatcttttcctctcttatcctgtcctagatccccatcagggtctattgccatggtggtgttcaacattaatccattgttcctgcctcctcctctgatatggtttggctgtgtcctcacccaaatctcatcttgaattgtagcttccataatccctacatgtcatgggagggacccgatgagcggtaattgaatcatagcagcaggttttcctatactgttctcgtaatagtgtataagtctcatgagatctgatggttttataaagggcagttctcctgcacacactctcttgcctgctaccgtgtaagctgtgcctttgctcctcctgcgccttctgctgtgattgtgaggccttcccagccatgtgaacctgcgagtctattaaccccctttttctttataaattacccagtcttgggtatttgttcatagcaatatgaaaccggactaatacaccttcccatcaaaacactcattctctcaaatgtccatcctatagcaaattgtttaaaaggaaatgaaaaaccctgataaattgacagctgcttaatatgttagctttcttacaagtttttacacttagaagagtatacccaaaagaccatgccctaatcccatagaatggatctgtagtggtgacatttggaggaatgcagttcgttgtcaaggaagatgttttgtacggtggcttcctgtattaggccatccttgcattgccacctgagagtgggttatttaggaaaaaaaaaagagatataattgactcacggttctgcaggctgtataagctgatgctggcagctgctcagcttctgggaaagcctcagggagcttttgctcatggtggaaggtgaagtgagaacaggcacataatttggtgaaagcaggagcaacagagagagtgggaaggaggtgccacacacttttaaatgaccaaatctcgtgtgaactcagagtgggaactcacttatcaccaagggaatggcccaagctattcatgagggatccatccccatgatccaaacatgtgccatcaggctccacctccaacattggagataacattttttttcttttttttgagacagagtctcactttgtcactcaggctagagtgcagtggtgtgatcacagctcactgcaatctccgccttctgggttccagtgattcttgcgcctcagcctctcaagtagctgggactacaggcgcaaaccaccacacctagctaatttttgtatttttagtagagatggagtttcgccatgttgcccgagctagcctcgaactcttggcctcaagtgacccacccacacctcatcctttcaaagtgctgggattagaggcatgagccaccgtgcccagctgaggattacatttcaacatgagatttgggtgggaacaaatatccaaactgtattccctccctgtccagctctcctgtgcatctctgcacattttctgaggaattaccatattgctgtgcatcagagtggaggctgtggtcccctcgttgtattcagggttacacctacacagtaaggttgcagggtgtgtgtggggttccagccccccgcctagttgattagccctccatcttgatgattgtgcagggcaggagatgggtcttcccaggggaaagagaagttttcacctcttagtaaatgccactaaggtttttcaggttacagtagttctttgactaaaggaagtcacaataatgtttataagtactgatgtggcctttggttgtatcacaaatttaaattaagattgtggaatcaccctgaaagattctttgcaagagatcatttgaagtaggcccagagcctctggctggttaatgaatacaggttgttttgttcttctaacgtagtcattttcccctaacatcttatcgtaaaaataaatagagcaacattaaaacattttatagtgaacgccgtatacctataatctaggtatcatcattactgtacttgctctatcatatatatccatctattcatccttcagtctatcttaactttttgatgcatttcaaagtaaattgcagacatcaatacacttttccctattacttcactaccaccatagttattttggaagaagcatggagagtaagaattttatgctcttaaactttagaaagctcttctcacaaataatttttgatgatttctgatttagaattgatagtaagtttagaaataggagaacctttttgttcattttcattgctgtttctctttgaggttttttttgttgttgttgttggtgttgttttttgtctttcaagttttgctccagggcagagttcccaaaagtagagctcaaggcaaaaataatttgggggtaaccttagagttgggtttctaactttgagagaggagtataacctatcactttagcattaatatcttttaaaaatgcaactatccttatgtattttttaaatacagtgaataattgctcatagttagattaaaggggcaggttttattaaccccaacgtcttttcattgagggtccgttaaccttagatgaaattatgcaataagaaaaaattatcctaggacatcttttggttatcaaatttaaaacatcaaataattcatgccttttcactttagcttagtggttctttaacagtataatgagggttatttggggaacttggtaaagacacagattctcttccatctctgtggaattctgagtcacaggccaggaggggcctaggggtctttaacacttgtcctaggtgattccaacacaggtagtcaaagagccacactttggtaaatattgctttatgatcgtttggaaattattgggtctgataattgggacttaatgtaaccacactcaccgtgtctccctttggctttcttgaatgctgtaacggtggctctcgtaacagattgcagtgagtgccagcaccatccccgaacaaatacagtccctctctgtgcacgactctcaggtatgtttctctgccagtcattccgtttgaggtgctttgtagacagatcctttaaaaaaccaacattttagaaagatagacaatttcaaggtagtgcctccaaatcaagggcttataagctgtctttttaaataggttgctattgactgtgctttgtgggacctccaacctttaaatgataggctcaagagtgagaattgattaccagactgctcctgaaattgctggtactgtggaaaagaagaaaaggaaagaaaatgacaccattctgttatattccagccacagaacattgtggttaattgatacttttattttttgctcctggttggatttctgtaacctgttttcataattctgttatcattgaattttatgggccaattcgtctctacaacttgccttgtaaaaataatagtccagtaactgtgacatgcatttataatgcatatttattaaagttatgggacagaagacgtggctgtgagccatggtgggaggtgttgagggatgctgagcaatccagggaaaggcctaggggcatagaaccagagcacaggcctgcattctggttctgctgtataattaacaggcaagcccttttgttctcaaagtggttgtactataaagcgtcaccactgtcaggatcataattttctttctttcaaactctgcatattcaatttaaattcatttctgttttacttggtctgtgttttataaaatagccatatattggagagataattagagtgattttgttggcttcaggaagcctgtttgaggtcagatacctaatgcggggcccttattttatagcttatatatagagggagtaaagacttgcagaggtgaagtggctcccccatagtcacaccactagttagaggccaagtcaggattcggtttaggtctttacactatatcaggcaactcagtaagagaccttgagataaactgtagggattggttgaatgataaaaggcaagttaagaataataatggatcagagggcaaagagagtaaaggaaacgggaacagggattaggataactagtactgtagagcattttatgactcactttcatctatatcattttattctccctgcaaccttttacggcaggcgttattcagagaatggcttgctcatggttgcatttcaggtcagtggcagtgccaagtcttgacctgaaatgccttattttttctactccaacaataaggtctactcatgtcccgggattccctgagaacagggagaggctgtgtattggagacattcatggttaataatcaatattcaagaaaatgggctctaggtgagaaaggcaggaaagataaacagtggctgaatcttctgggccccgccttcctctgcattgcagggtttaaggtgcccagcctttgtgatccccaagtttcaatagtaacagtctatgtgtgggttgtgaggtgccattttaggtagctggactttactacagcttatacaagttgtttatgatacccatcctagaactgaggctttccatatgaaacattcatatccacaattgtgatgggaattaggcaccattacaacctttacatggaggtgttacgatgccaaagaaggcctgcgtgtgtaaagatctagttttgaaatttccagaaagaaatggctatatgaatcaagtgatattgtgattttattcattcctttcctgatacagtttataacactgtttgctgttttctttttaaagggcccacccaatgctaatgaagactacagagaagcttcttcttgtgccgtgaacctcgttttgagattaaggtaaataatactgttgtttattctgcattgtttttcctatagtacaattttttaaatctccttcgttaacctttcataatattagcataaaatagaatcgttagcttatttgatttccccgaaccatgagtgtatgctgtattcccagggctaattgtgctcttctaattgcttgctaaagaagagtaagaaagaaaagcaccatatgagtgtgtctgcaggctcagtgtacctttcattatgttttatttccttgccttttccttcttagatttttttttcttttcctttttctttttttttacaatgtaagatcacagtaagagatttttaatgagtttctttcacacttcagcagtcggtctctgacagaaataaaccatgcttgtactacaggttgcctgttcagaacatttttcattggcaagtttgatcagccactgtggagaaatgacagatatattttgaaagaaatctcagtcttctaggaaatggatacaaatatggtgcctgacagtatggtctttgtctgcagtagtgtgaatgaaagcgttttccgttttaaggattttttttttaattatttaaaggttcatctttgtgatgttctttgctaagaatttgatatctcaagacaaaactgtttaaactgaattataaacagcttagtttaccagttctatcagaatactgtcacatctttgaagatgttttaaaagaagttatacatatgttcttctgaccattaaacaaataaagcacgtgcatatactaggcattttctgagttgtagctacaaaaagcgggttcatcagcaaggttagtttctggccactagggattttcagagttgtagctacaaaaagtgggctcatccttaaggttagtttccacccctctgagttatcatagtccatctaagtagaccattggcaccataatcacccctcacttctgatggtcatttatagtctgcattttcacgtatttgtcaaaggaacctcacagtaacccttggtatgattcaattcagagttaagaagtgaaattatcacaaggctgttttccttatatttgacagtagccttgattattattcacagttcgtgaatttagcaatcactaaagaatgaggtagcccattccctttttgtttgactttcgaacgaggtacttctttcatttatattttacttgttcagttattcattaattcagcccgtatttatgaggagcccactctgcgccaggagctctgtgccaggctcatgttgtcattgaggtgtagtggtgagcaagactaccaaggttttagtctagcccactgagcatgcagtgttggaagtgacctttagaatccaacagtctaatcgcccactttatatatgcaggaatcttttttttagtgtctctgctggatgtttacctagcttctgtgcatactaaagctcacgttttctccatgatggcccctttaatactaaataaaagccttaattgattgatggttcttcctcctgaagattaaaccgacttttctgttctgggctcctatgggctgtaattctcccccttagtgcaaatatcagactgtctgcataaaagtctcctggaaaatgtgtcaaaacacgtactactgaaccttaactttagatattattttgccctgggtgctagagcaatatgacaaatgtgttcccttatttttctgagagccatttgtatatttgcaaggaatgttcttctcttttcttagacaaaatactataagaatctttagcctttttctcatgatacagtttctatattgctcttgcaatcctagttgctcacctttattaatatttagtctgtatctgcctttgttatattttctcttgtgggtataggttgttttcataagcttgtggcttagatcactagtcctacatgacgctccaggaagaaagggttctatgttcaaataagttaaaaaacaatgcacactattcatcaatctgtgcatgtgcacacacacgcacatacacttttttttggaaatcataaggaatattaacattaaatattttaagaagttctacaggaagataatttgtttaactttctttaatctaaaacctatttgatctcgtaactctttttatgtggttattttgtgttccttttgtatgtagtgcccatatttaaatacaggattccagatgtggtctgagcagctggaatacagtattaagataatgtggttttttttttttttgtaatccacactctatatttctcctaaatcagcctgagttttcattgccttttgaaatatccatgcacatgggtgacatgttcagcatgactcagcagccaaacaaaacagctgatttttttaaagggctaccaagcctaattctgaactgcaactctagataaaatttatcttttatcactaataattaacctgatagttttgatgaatttcttgtccactgtgtgtttcaatcatcaccatcagtgtgtcatattctagtgtttagatgtatgtccattgccaatctgattaacctgccttttaatctttatccaaaacattgattaaggtgttcagtagtttgagggcgaagagtcttctgacatctgttggaaaccattcactgtcggagtgactttcagtaatgaactagtgttctttgatacagttgttcaaccagcaacaaattcaatgccttttaatgtacatctaacacaattattccaaaggatatcataaagggatctattatatatgttgctgaagttaatatgtaccacattaatggcattttcctgaatctaatgacatagaaacactttcaaataatagaaatgtattttagtatgacttattttcagtgaacacttgttgatatctaattgttggtacatttgtctagttaggttgccattaaaaaaaataccatagactaggcggctgaaacaacagaaatgtattttctcatagttgtggagatcgggatgtcagcatggctggtttctggtgagggctctcttcttggcttgcagctgtctgtctgcttactgagtcctcacatggtggagagggagtgagagcaagctctctggtgtctcttgggtcccaccctcatgagctcacctaaacataattacctcccaaaggctccatctctaaataccatcacttggagggttagggcttcagcatatgaatttttttcagggtgggccacgattcagtacatagcagttggtgtactttttttttcgctaaatatttacaagctagttatttagactattacttttcatatttgtgaactcatgaatctctgagaaattattgttggagtggggtggaaaggggggggatgtccttgtacttcagtttgagaaatagcctttgaaagttctaagttaaacagtattacttttttgtgatcaccgtgttctaaagtaaacgaaaatggtaaatacattcattcattctataaatatttattgagcacttactatgtacatggcattgttccaggtgctgtaatgtaccagtagaaaaaagaaaaggcagacttcttgccctaaaggagcttacattctagagccagggagaggaaaaattcaaatattcaaattggttgtatgatataccaggttgtctgaaggaaaaggtatgtgaggaggatagaaagtgagggggatggtattctatattatagaaggtatattagatttctgttgctgtgtgaaaagctatcacaaacttagcaacttagaacagcacccatttattatctcagtttctgtaggttgtaagtccgggtacagttgagtgggatagtctgctcagtgtctcgcaggctgaaattgcggcatgctcatcggaactcatggtcctctcccaagcctttttaggctgctggcagaatttaggtccttgcagttgtggactgaggccctgagctcctataggccacaagcagtttacaacatgattcttgccctttcaggagcagctgtggaccatctccactacgccaccctcactcccaaggcctcggtctttctgttcaaggtttttcacctgattaagcaggcctcacctaggataatctcctttttgatgaactcaaaatcaaactgatttggaactttaattacatcttcacctttgccatgtgccataacttaatcgcaggagtgacatcccattatcgttataggtcctgttcatactcaaggggagaggatgctgcagggcaagttcactaaggaatgggtttattggggtcatcttagaattctgcctaccacagaaggcctctccaaataaagtaatatttgaacagacagacccctattggaagtgaggaaacaagccacgaggccgagcaaacagcacttgcaaacgtttgaagcaggaagcatgttataagtaattggaaaagcagccaggtaaccagtgcaggcagagccaaggtcatgggcacagagagttagcaggggccaaatcacgtagggctgtgtagcctgtggtgaagactttggattttactgttagagggcagaaaaccaggaggcctgtgagcaaaagagtgatatgatctgaataaaattttaaacagagagctgcaattgatttatagagaacagaccatgtagagagcatataaggtggctgtgagagtccctaggcaggctactgccatgacatagtgacgatgatgtgacttggaccagagtgaggattaacggaagtggtaagcaattattggattccagattggggagaaagaacttgattactcaaggttttggcctgaaagtatggaggaatggagttactattttttgagatggaaaagagagtttgagttgcaggttgggatggaataaagaactcagttttgcacatgttaagcgtgagttgtctgtgaggatgtatcaggtagggatttagatgcatgatttcaaagatgtctcggctagagatgtaaatttgggaacagttggtgtctatggcatttaaagttatgaaatgagtggaatcatctagggagtaagtgaaggtagagaagagaagtgggctggtactgtcacagatgttgcataggtaagcatccactgattgagaaggagaggctggtgaggtagaggagagagtgatgttcctaaaaaacaaatagaggaagtgtttgaagaaaggaggagtgaaaagctgcatcaaatgctatcaataggtcaagtatatttgcaaaatgaagcacatgcttgaccttggcaagaatattttcagtggagtgatggggacaaaagcctggtccaactgggttcaagagattggcaagagagaacaggggataacaaatagataacttgttagtacagataactcttgtgagaaattctcaacacaagggatcaaaactgtggagtgatagctcaatgagaatattgggtaaaggaagattttttttaaaaaaagcatgtttacaggtgaatgggaatgattcaatagagaaggaaaaattgaatgagggaggggacagtgccagactgatgttctcagatgggtgaacagggatgatccccagacatctgttagataggagaaaggagaggtcatctcttggatggtgcagctaccatcaggggaaggcaggcaggggtggcaggtagaggtgcaaggagactgtaccttgcctggaagtcttcttctgtttctattttcccagtaaaacagggaatgtcattagttgagagtggaaggaaaagaacgtgatggaggttttagaagagaggagaataattgtgtaggagagcaggagagtaaattttctagggaaatgcagaaggattaacaggctggaacagggatcactggaggttaataatgacccagcatgtaagtgtctgtgtgtgtgtgcgcgtgcatgcgtgtgtgtgtgtgcacgtgcgtgtgattataattaaggaaacacaacatttaaaaacattcatagagggccaggcgcggtggctcacgcctataattgcagcactttgggaggccaaggcaggcagatcacttgaggtcaggagttcgagatcagcctggccaacatggtgaaaccctgtctctactaaaaatacaaaaattagctgagtgtggtggcacatggctataatcccagctactcaggaggctgaggcacgagaattgctagaacacgggaggtggaggttgcagtgagcagaaattatgccactgcactctagcctgggcgacagagcgagactctgtctcaaaaaagtaagtaaataaataaaacatttgtagaggattctgtgagcatagccatgggccaccatcttagaaacactgtttaagtcataaataaatatgagtcatagaattgctgtcaagctgatctcttgtgtgcaaggtggcagtcccctgtcctcttctctcaccccagcacccctcaaaggtctgacttccttcttttatagcctttgaagttacaagctctttgagtatcaaaaacccactatccagtattgttccctgccacacaatttgttcatacccattccccatttgaagtctactttggatcatttgcatcatctctgggcctgaacaagctattctctaaaccatcctgtgtgatagggagctggaaggctgcttttggctggtgttgatcagatttttaaaaatccatgccctcttttgcaccttcctcatttgtttccatctccattcaagactctgatatatgtgaatgcatttgtacatatacatatctacatgtacacacacatatacgcctgcatatgttacacatacacgtatatttgtatatgccctcactctctgtgaatcactcctcaatgtgatgcgtggctgccgggtattgggaagtagtatgcttgcatttcttatccccgagcctatctgggtgtgacatttatgtgtgttatgctccacaggctagtaggtaggagactttagttcaggccagcccttcctcagtccttaactaatgctgtgtgggtggctgccctctccacctcttggaaaggtcactgtgactttctttttgacatagcattttatggccctacctgctgggaacgtggcttccttcctcactgcacgcccctccccctccccccggaagctcaccttgattttgtaagtaggaaactgggaaatattttccttttcaaaatgtcacactctaggagaaaagacaaatacgttgtggctacaggtagtgtatttctccactatttatttattcctggagatcataggcaaaagtctgaggaggcaaaagggtagtttcttccttgaaaaaaatatagtgttgctttaatttgctgttatatgcaatatcagagaacaggattagaccttaaggctcaatgttaaatgctggaggtggttaaaatgcagatttatctttttcttttatgttttttgcaaattttttttgtccatagtatatatgataatgtcatctatgatatcaaaaaaattgaattatcataaagcccgtacaaggtaaggaaatcctcctaaatgctaaactcaggagaaaaataccaagtgggccaccttgtaatttatatactgtcagtagatggtaatacagtttctgttttgagtcaaacattatacaaatatttttccattagtatatttttcatcaaataaaatagtcatgcatttggcacaaaacatgtttattagaatcaggctcagtgatttggaaaatggtaaatctatcacttaaattattaattcctttgtattagatgctgttcatactttgacagctcagccctatggatggcatttacagttttgctgaaggcagccctgccaattgccatacatagatatgctggtctggtatgtcccatcaatttgctcatcatgaatttaccttgttattatgtagcagtatcattggaccttgagggaccagttgaagaccccagatcagcagagtggcttcctgctggtagggaaaaatgatctctagcacgggatacttattttaactcagcatgacaattgttgcatacttcaatttattattttggtttcgttattaaaagatgcacttagctatttgtaaagaatagacttagtaaattatgatttcataaagaaagctaaatctgttagaaacgatgttggccattgttttagcatgagtatgccagaattctaattccatcattattcaggaggaattataattcttaaactgttctctagcctataaaatagggttatttgtataattcttaccggtcaagtggctgggaggtttgattaattttttccctgaaaggttaaatagtgtaggcatagtgttcagttatgcagtgcttttttagtacatgttcttttttccctccacagcaaactacttatttactgctttctttgtgcaagtctttgttgaaaattcaaaaatgaataaagcaaggtttctgcactcagagagcttaccatgtaggcggagagatcagatcccgcacaagtgaccataatataaggtagaaggtgataaatgcagtaagaagagagataaaactaagaagctatgggtagttagaggaaggtgaaagcccttttgtttagatgttatctttggtgtgcttgttcccatagtaaccagtggtattgttttttgtgtgtgtgtgagtttttttttttgtttttttcaacaaccaaattttgagaagagtaatggataggacgaatccagggtcagtgtcatgctgtggtctttggtaaggggtttaccgtcttaacttatttctgaaaagacgacatttgtttttcagtagagtggtatatgttattacgtgggtaccaaattaatagaaatacagtgctctgatccaaaaaatgtctggcattttacttcattttttgggtgttctcttttggttgttttctttgagaatttgagtccctgatgcatatcttggctttattagtggtatccttcaaaaagatgaaatgcctactatgtgccaagcacgatgataagcacgttgtttgctgtgtcttgtttaatcatcataaaaccaccatagcatccatcctattgttaccagaatttcacatgtgggagattaaggtttaaagtcatgaaataatttgtttaacaccgtaaagctcacaagaagcagaggtgggtcttgaagctaggtcagtttaacatgttggtccttgttcttcttccctgaccctgtggccttgctctattcagtcctgttttgaatgcagtcagaaactcctgtactttagggattgttacatttacctgtcttcccattaacgtttcacataaatattcttttaacaatgtttcccaacaaactcatcattaaatgttatgacaggaatattggaaaatatttttcttggaggagatgctaaagatgctgctgcaaatagaaactggcatttatcgtgttttaataatttttcaagcactgtcacatcacttgcttgatttagtttttcctttcgtcctacatttgctgctgacagatgaaacagaaagactggagatgttaagtggctttcctgcagtcacagctgtaattctccagctggctagcatctgggtcttctgacactaattcaatgttattgatgatatggtatagggagatagtatacatataggtgatagagggtcgtgtaaggtgttgcctttggcatatacaaaatccttctgctggtaaacatgctaaaggaaagaaggtttgtattcagaaaaaattggtataagggaagcaaaatagaagcatgaaaaatcattcattctgcgataatactgttttttccttgacaactgagcaagaggacattgtgagtacaaatactttcagcaacagagaatgcatagagttctttaaagatattctgtattttcaagccgtaaatggtcatcttagaaattcagaaagtcaacataaattaaagaaataacatcatccataatctcaccacccagaaataattattagcctcttggtaaatatttttccagacttttttctacatacatgttaatgtagatttttaattttttaaatgttattgtataaactttttattttattataaaacaacatatgttgttttctaatctgctctgtttactttggtagtatgtcctggataccttttcatatcgatgaatacaaatctatagaatcctttttaatggcttccttatatttggattgaatgcaccaaaacttatattactgaaaaagtgttatttgatattgagggagttcccagtttttcagtattgtatcatataaaaggttaaatgtacaagaatggtgtttgaaaactgcccagtaggaaaatctctgttagctttgaattttgaccttagtgaaatgctcttagactttgagaagcctgaagatacagaactgagtaagcccagtatcaaagcacatggggattacttaggagctggttctggctcttgggtcagcagaggttgtcatcatctgtgtagcagcagacaccgcttcctcgctctgtgttggtgctgagttcttgcagcagggttttaacgaggtccctgcactaagaagctccaaaactgaatgatttcttaatgtaagagggttccattttgaagctgttcttttggatacttccttcgaaagcttattctttaaagaatcctcccttagctgcttgctgtgagcacccaggagttagaggaagtagcctgtgttggacctaacagttggaggagatgagagatcacctttatgctctgtgagccttacacaatggctagcatgttacagatcctgaataaatatgtactgcacaggtgccaactgaatgatttttaatgaaaggcgtattttacaaacaatatcaagatgcttcacaagatgctgtttgcagctctttatttttgacattgtggtggaaacatatacagaaaatactcctttgctagattgctttttttccaaggcaaattaatccttttgacataatctcctatattttgttcttttaaatacttttctgttaagacaaaaatggactttttaaggtacctactattttaaagatattttctctgcatgcttatctatataaagacatgaaaagattcatgagaataaagcaaaagttcatagaaggtgtggagagtcctggaaatatgaccaaacgatcagtccagcaggcaagaactgcaaggcaggttctctgtcagagaataaaagaagggatgctaaacaagggccttgcgcgagcattccctgccctccattgagacccagctgtgttactgtggcttggcacagtgtctattggcagttcccacctctaggtctcaggacaaactctcatcgttcacatttgaaagtgtggatgtgctatgtttctatccacagagccttctttggtaagaggtttcctagttaaaaaaaaaaaaaaagtcttcctcattcttttttttccactaaaagaagagtgaagccaaacacctatcagcagctagaggatggaagctggcctgcctctgtggagcttaccatggctgtctctctgaggcagggcattttcaggggagctctcaggtcagagaagtggggtgaattgtgccatgtcgcaagactagtcagtgtcagccccaggagtcaaatgccaatatcaaccttaagagtaaagtagagggggctgggcgctgtggcttgtgcctgtaattgcagccctttgggagaccaaggcaggaggatcgcttgagcctaggcatttgagaccagcctgggcaacaaagtgagaccctgtctcaaaaaattaaaaaagagtagagtggagggcctccttgctctcctctcatcttaagttccacagcattgtagccaggagtcagtcttgcatggtagaccaattgtttggttatgttttggggactctcgtgtcttctgtgaactattgcttctttctcatgagccttttaatgtcattacacagataggcgtgaagagaaaatgtcttaaaaatagtcagtaccttaaacagcttttttttggtggcatttaagtcaatgttaattacctgataccttacctgatagtagcctgaaattttaacaaatgcctttgtattttaagttatccttcctgtcgctgtgcagagcctgtctccctcatccttttttatattccacctttcctggctactgatgaggtaacctgctgctcttagcattctaaaaattctcctctccagttttattagggaaggttgtctcttaggacttgtcctcttgatcagagatgaataattctggagactgtttgcagagttatttcagttctccgttaccatatccctgaagataatgagtggtaagatttcttccttgagatgctgagtcttggaaaggtaacaagtatatttcagtttggggactttctttgcattaacttttctttccctgttgaaaccagacttcttggaatgtaatttaaactttatttagcaatccccgaagtgctagaaaactttattctccttggtaaaattcatacagttgttaactgatggtattgtgggaaatctctgctgtccggtgaatttcattggttggcctttgtattagttttctatcactgctataacagattaccatttacttagtggcttaaagcagcacagatgtattgtattccagtctgtaggtcagaagagtctcagcgggctaaaatcaaggtgtctatagggctgcattcctttctggaggcccttggggagagtctgtttccttcccttttccagcttgtagaggtagcctgcatccctcggctccttctgccatctgcaaagccagcagcttaacatctctctggccttgcttctgttaacacaagcaagatctctttctctgaccaccaggaggcttctctgcttttaaggacccttgtgattaggatggtctcaccaggataatccaaaataatctttcttcacaaggtccttaatttaattacatctaccaaatccctttttgccatgaagagttaacttattcacaggttcctgagatttggctgtggacgtatttcggagctattattctgacactaaagaaagattttaagtgtctctccttatttgtggtatataatttctaatttttattatgcttgcttcctggtcccacatttcttggtattacagggcctgatgcagtgcctgtcacattcctaacattcaggcttccctgaagtagggcagtgaactttcatgagcttggattatcattatggagcacctttggagtgcccagtgtatgccaaatgttacaaagaagatacagatgtgtgtgaagcttattttcttctatgttttgagacaatcatatggaagtatgaaattgcatattatccctttcagctgataagagggattacttaaaagtacaaggtaatttggaaggtgtgccttcctatgaaatctttcaagtagagatctggaatctgtagttcccatgtagccccctcctttagaatcggacacccagttctctcctaatgtacatgagtagtgtgtttctaacgcttcactattacaaacaatgccaccttacacacatctggttatttcccaaggaagagtaggaacacagacacaagtcaggcaagtgcagggcacaggcaaggagaattgctagttctcagctggtggctggagtcatagttactattatggatagcatttactgcttgctactcatatgcaaggcagtgtgttaaatgcccactgccttgtttcttttacttctgacaacactgtgaaatagatactaatgttattctcatttacagatgaaaaacaaccaaagcaccaaagttaatttacttgcctagagagttaaacactcctgtttagtacctgagcaggaattctaacttgtgttatctgatcctggtaggtcctcatttaaatgatgccctggatagcttccaatgaaagaaaagtccagaaatattgattggcagatacttggttaaggattttgtgctagggaattgggattttcttttctaggcaatggaaagtaataaaaatatcttttgggtgacaggaggcaacctggtaagaaaattaccaggacttttgttcactcagaaatcggagcttatctatctctctgcctccattcttgtcattatccagcattagccgtgtgttctggatgttaggtggtagccgggagagaattgattaactcaggggagtcttcatcttcttcagttcactttcagagatcctgagtcttgtgtggtgcttatttcacactgtttttctttgactgttacatcaactgacaatccaacgagcatctgggcaaagggctggtggttttacaaggtactcagtggccactggttatcagagctatcacttgttccttttgcaaacggtgatgaaaaccatctcgtcaatagcattaggcattaggcatttgccagatgatgcattaggcatttgccagagctgaccacatttagtctgtgtgacgctgttgagggtattacatgggtaaaggaaggtctggggtcacatcagaggcattgcagagctaggggaatgagatgatatgaccatctggacatggcgcctagctttgatgccagtagctggtgtcaggtggcggggttgctaattacagaaggtagctagagaacctgaagagtcaacaacaaaggtggtggaaagaataaagcaagagccaattattggaggcttgagtggttcggttagtgttttctagcaggtttcatttacccaggtcctgtactgtccctggggcctgcagatgacctcttagaagtggcccagtttggtccaatattcatgagagacaagaacatgaatttacctgaacttaaaaagcataggccgggccgggccgggcgcggtggctcacacctgtaatcccagcactttgggaggccaaggccggcggatcacgaggtcaggagatcgagaccgtcctggctaacgtggtgaaaccccgtctctactaaaaatacaaaaaattagccaggcgtggtggcggttgcctgtagtcccagctactcaggaggctgaggcaggagaatggcatgaacctgggaggcggaggttgcagtgagccgagattgtgccattatacttcagcctgggtgacagaatgagaccccttctcaaaaaaaaaaaaaagcataggccaagaaggaggtagaaaataactgtattttagggaactatggcaaaataaaacccatcacttgataaggatcttaatcagaatttggctgcatggaataactagagattatctcctgagctttcaccctctgggccacatagaaatgggactatcaaatataagaactactcttttaaaaaattttcagaaaataaaactctgtgccgtcgtctggtaatctgcttagctcagtgagtttccccagtgaggtaagtagttaagcaactttaatctccaaaaggaaatatgagttttggttgagtttttaatgaatttggatatggaagatgctgtcaagcatacctggccacaaagtattaatgtaaatcctctttaaaaccctttgactcatttttatttgcagagatacatcttgtttcataaaagcattggagggcttctgccctgggtaagaaagcaaaccacctttctgacacagagggccctggggaggaggtttggtctcctgtccccataagtttatattaatcctttaccttggagcatgctgcagtggctacttgaagatgacttttcagtccctacttggagaatttaccagcatgcccaccaatggcctttgttgtcttaatggagaagctctggggattttgtaaaaccaaactttgtacgtttgtctggaactcgttctagagttcttgctgtggagcagatacaaggtcagctcagtcaaaaagctgatggggtttttgtcctttgatcctttctctttttatggtttggttgcaccattttgctccctcccccgaaagagaagtctttctctgagaatgttcaaatgaattattaggcctctaaagcacttaaaatgaatgtgtattaccacagcatggctataccattttaaactctaacattgtaaatcacacaggatcctagtcagattggccttttgactacattagcctagctgttctgttgcagggaagtgtattgtttgcttatagagtatttttagcaatatccaagtagctaagaagaatcttttttttatttcttaaaacattctgtctcttttacctcttttctccaacatctgaaagaaaatggggaacttaaaaaatatcagggctaaaagatatttaacaatgcttcattctctttttttcctttttttttaagttgttttttcttcattcttttttaatcagtttattgtacaatctatactcgctgggtaaaaacaaaacagaagttttatgtttctttagttactgcctttaaagagttgtcagatcttcccttcccatcttttaatggcatctttggcattaggccataattttcctgtcacttggaatgtaaaaaagtttggtttaagcttccatttattatgcagtttcacctttatcccctcccatcacccacctgacccctctccctgaggagggaacacagttaccctttctcccctttttgggttgctttttcctcttggttgccactgcttctctaaaactaactggctgccagtgtcctctgaggccagtgtccaaaggccagctcttcagtagtgacccttgtgggactctctgaagagatataggccagctctgcttcctttcacctagggaggtgagcaagtgactcacctccacttgggaggagtggggtgatggcaagatggcttgatgtgggccaccttccaggtgaccccttcaccacaccaagacacgggggtaggtgtgcgtggatgctgaacggctgctccttctctgcactctgccgtgtctcactagttttcttttgtttgtttgtttgtttgtttgttttgtttttgagatgaaggagtctccctctgttgccaggctggagtgcagtggcacgatcttggcttactgcaacctccacctctcaggttcaagcaattctcctgcctcagcctcccacatagctgggactacaggcatgcaccaccacgcccggctaattttttgtattttagtaaaggcggggtttcaccatgttggccaggatggtctcgatctcctgacctcgtgatccgcccgcctcagcctcccaaagtgctgggattacaggtgtgagccaccatgcctggccatcttgctagttttcttttccttgctcaggcagtaggggtagggttgatcgatatgtctgctccctaagcaggtattgatctggggaatgagatgccagccttgcctccttgcccactcctttgacctgtggagtgcctctctgggggactcctgcagttgtattggtagtggggagcctcagtacacaccctagaccagtaactcgtgagggttccctgtcattctttaccccttccccatattttctttataaagataggagttggaggagtcagatgtcgtggttggggctagcatagccattttggccaattgttaataagccttaaaggagtagcatgatatttgcatcaatctttagaatatggggtagctgatgtctggttatttttagcttagcatcctaggaacagtgctagggtgacaggaaaagattcacctaatatccactgtcacagtcattcttctgtacgtctattgaactcctgctgggcaagttaccatgggaatattctaaaacataaactttgtccttgaaagatcttatattttggtttaagaaaataaggatataaacagagaaaatattgaataaccatataagacagcatgtggagaatagttcaaataaattaaattgagaataatggtgtcatttttcaaatatcagtgtcaactggggtggacggctaagactgcctctggcctgctgcagggggtgtgggggtgggtgaggcagggggcctgagtgtttctgttctagaggatgccttccagctctgttgtgtagcttctagctgtgctctgcaggttaaaagaagaggaaacacccagggtgtgggaggaatggaagaagaaatgtgaaaatgtaccaaggcacaggtttaggactaacttgattttttttttaaccagattaaattttgaaataacatcattatattcttgtttataacttttttttggtcacttataagatgcaaatgaacaatgttgggttttttttggtttttttgtttgtttgttttttgtttttttgacttgtgcctttactttcaacagaagttacaaggagcttgctgttcactgaatgcttttctttctcttctctgttatcaggttgattcctcttcagtatagttactcattttttcctgtacttacctgaaaggagaatgtaattaaccactgtctttggcagtgggtctgttggaattattacctgtttggcccttagtcatggttggttggtttacattcttggtctcctttcccaatcttatttgtcttctgtgacccttgcccagcatgcagttggcctctccttccactgcagacaaacaggtcttcgctcaccttcccaaaaagctgtcactggttcccttgggtttgcctcaccacagtgcaacaaagtgcatgaatttgggtatttgtagatttggtgcagtgtacattttaatcttcttcttctctttttctaaactcctggtccttttatactttccttcctgtttcttagataattattagaggctgatcttttcagtgttagcatctttcttataaacagtctttgggtcatatttcagtattttatcaagcttactttaaggacaaatcaagctgatgcccagtaacctctcttaggctagaattgactttatgatgttcagtaaatcaccatgtttaaggactccaaacttatcgtagtggccttggacttcaagttgcatattgagtgataaggaaaggaccatatatctatttttccatcctaatctctactatgttattggtgttgaaactgtagaaaggtccattaagtctaaggttaccttaaagggaggttatctctgctgttaaagtgacaatacccgtgatatactcaacagtattgcaaggatcttcccctttctctcaaaagtcagctattgttatttacttgtgctgctgcctacttcatgaaaaaaaggagccatataaaagtgatacattttaacatgttgcagagatgaacaagggctttcacacaacctccccagagaaaggaataataattattttgataaagtgctgttctatttgagaggttgctttcctctagctaaatcctcaataataatgcctacatctattattgttctaatataaagaattgcgagtgtagggaattattttatataaagagattctcactctagggaatttctatactggataatctgcagcctcctgagtgcaaataaaaaatggaaattaaaatcctctagctttgaagcatacataataaggctgctgcaagtacgaagtcagaaattgtgagatgatcaaaatcttcacagagtaatatgtgctaatgacaaagttcaggtcagaaaccaggaaaagaattgagaaagggctatggttgtgttagcagcctcctacatctttgttggtggtcagaaattgtgcctgtgttgtacttctgagttagttgtaacctattatattcctctttgctgtgtcactcctgcaaggagaatttgcagagaaaattcacatttgcattgcttctgtgttttaaaatttagaagcagctgcaacatgatttaatcaagtagggaaatatcgtttaactacattttgggggttgtttgtttgcctttttgctgtatatacacacttaattgattctgttactggggtttgtatttattttcaatttaaaaattaggaatcatcagcctccagattacttgcctctattagttattgatgagtgatttttttttgccatcaatgagtaataaatagaacacctcagattaattaattccatttgttgaattgacctttgtttcagacactgttctgggggtataaaatgaataaaccaagttaaatgataaaggaaaacatactctgattgctgagtaaaaggtgggctttgaactgtattttgtattcatagccgtcagtcaggtagttgaagattgactgggtaaagttgggcggtggggacggaggggccaggtagataatagttcttaactgtgggtgttagggacctaaaaactcagattaagcctgtagcttccccctcctgcccctaccaaatacatatttaacatttacatagtattttgcaggtggtttagataggtttactgatccccagaaacccatctatggaccctgcaaagctccaaaattagaaggaaggtggctgggtgcagtggctcactcctataatcccagcactttgggaggccaagatgggtggatcacaaggtcaggagttcaagaccagcctggccaagatggtgaagccccatctctactaaaaatacaaaaattagctgagcatggtggcaggcgcctgtaatcccagctactcgggaggctgaggcagagaactgcttgcacccaagaggcagaggttgcagtgagccaagatcatgccactgcaatctagcctgggtgacagagcgagactccatctcaagaaaaaaaaaaaaaaaaaagaaggaaggaagatagaattaagatccttcaaacctgttgttactgtttttccaggaatgcccagactccattgtaacccctacctttgaactgggctaaccggacttaaataggaattgtgccataacctatctctttgttgtttttaatatacaaagtaacagtagaaagttaggttgagtatgaagatgatttttaaagggagggcttttccgtagagagatggacagagagataccctagaaatatttagaggaactgaaagttgagtaagcattgatgtaaccacatgatataaatgaatgatttatttttaccttgccttgttccagagaagatttaaggtgacttacagtatgaaagcataaagtaggtgaagtaaaatgaagctaaaatgagattttaaaaatatcttgagagtggaaagagaattgggcagggaacccagagtgatataattacaatcactgagaagaaaatttagccttcagcttgttagcaaccaggaaattatagttgtctatttagtcctcctctcttgacaaaagtagacctataggattaaaagattatatagcgaggcaagcttttgcttgataccaaattcaagtggaatttatctcttggttctttctataaagaaccttggataacatggcagagagcttgacctactgttgcaaaaaatgttcttgagttattttttcttagattgacactccttagaagtcaagggcttatcttcattgaattacagcatacaacataaagtaatttcttcagagcctaaaccaagttcaggtctgttttctttccactgatcaactctgagagaagatcttgagcttaaagttaaggaaatgtttttagcagggaaagaatagcagttagtccaagttaggagttctgaccaccatctaaagtacccatttgctgtatgttgactgaagggaattcttaggtttacagatcagatgagtaactagcagcattaccattctcattggaaaattcaaaaatctgatgtcacttagacagacgagcctccacttgcagacatactgtagagaaggaactttggggatagatcatgcatttttttttttaaagagccaataattctttccccaaatatacagtggacagcatacttgtaaaccatacagtataggagaagtgatattagcctgggcaaattacttttcaagtaggtgtgatcaatggcttcctttcccataaaccttgtgtatcctttggaacttttattattttaaataatataataatattttataataataaatagaataatattattaatacctctccaagagttggactttaggagttggaaggattgcatattttttaattatagcaaatatttctcaccagcaataatattagttttagcatattaatgttaaacttgttaaaaacacagctcctcctggacacacctgctgaggtcagatcccatgatcttctccctagacggtaagctccaagtgggcaaggaccaggtctattttgtttacttctctatgttccatgcctcgcacagtgcccttgattcccataatgcacaaaatttaaagaggcatgagtatgggacctgtgtaacttaatgggttaacagttccatgtactaaaaaagagagaaacgtcactttatgtaattcagtgactatttttttaagtgcttactctataacaaggcagtgctgtattaagtgtcaagggaaaagaacccttagctttggagagaagataaacatatacagagatagtttcaatgttatgggttaagtccttgatagtcctggggtttcagaaatataaacattttgtcaattaaaggtatgaagatgccatatgcttgtattacttccttatgaaaatgaaacttcatataattattaattaaagtctatatttcacttaaaattctaggtgaagaaatctggataaaaaatttattgggaaggatttcatgttttgaactgttgtccagtgaggttatatggcagtaattttctccagtagggaattcctaaagttatcccattttgaagaaggtatgtattacatttttcatccacatgaagaagattacacttgagaacttagcgaaaagcatttgttgaagcccattactcagggcaagagctacctaatttttgtgatttatctgctatgacgcttttcaacttaagggtttatattttcctttttttgtgtaaaaagaaatacttggaacctatggtaatttttttggcatccttgttgattcagcccttttgtggttagttttttcttcctttattttttctatatctgtccacctgtacatttatccaaatatatatatatattgagcaacagttttattctcaatgttagtaatataaagatgaacaaggcaaaaaccacagcatacaatcggctcactgtgaggaagtcattgagtaatttgtagatcggagtgcggtgttgacaggcattgtaatgtacaggatgattgaggaccagagcccagagatggtactgagttctacctagagtagggtagggagtctgaggtagggatagagaggctcagggaggcttcccaagggaggcagtgcctgaatgggacatttcttatttggttgtataatatatcagcaatacctttatctaaaaataaattcctgggtggtgaataataggtttcttacctttcttttagccttctgatttttaaaataaacttaattgcagtataatttatatataataaattgcatccacttagtacagtatgtttgatgaattttgacagctgtgtacacccgtgaagctatcacagtcatcaagacacagaacatttccttctccctgagaagtttccttgtgtcccttttgcaatccattcctccctccacctctggcaaaggcagtcactgatctgctttttttttttttttttttttttggagacggagtctcgctctgtcgcccaggtcggactgcggactgcagtggcgcaatctcggctcactgcaagctccgcttcccgggttcacgccattctcctgcctcagcctcccgagtagctgggactacaggcgcccgccaccgcgcccggctaattttttgtatttttagtagagacggggtttcaccttgttagccaggatggtctcgatctcctgacctcatgatccacccgcctcggcctcccaaagtgctgggattacaggcgtgagccaccgcgcccggcctgatctgcttttttcaagctatggatcagcttgaattttatagacttttatatgtattcatttgtgtccatcttctttcactcagctattttgagatctattttgttgcattccctttgattaaagaggaatatggatataccacattttgtttacttacctgatgatggacatttggggattttttttcagtttttactgttatgaataatgctgctatgaacattcatgtatagtctttaagtggtctatattttgatttctctttgaaaaatttctagttgtacaatggctgggttaggtggtaggtgtgtgtttaactttttaaggagttttgcaaagtggattttccattttacagtcccaccagcagtgtatgagaattctagttcctctacattcttgttaatacttggtatcgtcaatctttttaattttagccatttaaataggtgtgtagtggtatcttattatagttttaactttcatttctctgattagtgacattgaacctttctcatgtgtttcttagccatgtatgtcttctgttcagatcttgtttcagtattttactggattgtcttatttctgagttacataaattctttatataatctgaatgtaagtcctttgccagatacatatggataataaatatttttctcactctgtggcttgcattttggtttcttaatggtatcttttaaagaacaaaagttttaaatcttgataaaaaatttaaagtatctttttatgatttgtattttcttgtatactatttaagaaatctttacctatctctaggttgcgaagattttcttcgtttttttcctatgttttcttctgagggtttttttttttaaatcattttagcctttacatttaggtctatggatattttaagtactttttgtgcagtggtgtaaggcaaaggtcagtgtttttttgtttccttccagatacacacttgtgccaaccccatttgttagaagatctgaacatttgtaataagttttattgtcataataaaagaaacactttttcgtgggcttggggggatgcaaaaaataaactcagaggtagtctcctacctaagcaatacatgtattaacattttgttctttcttccaagcactttctccaagtttacatgtgtgtttttaattataccatagactcggctttgtatcctagtctatctaactataggtaacatttctccaaatgtttcagattttcaactaaaccacacctatttcactctgtgtgtttgtttgtctgaatcactgacaaaacacatttacatagtttaagttttagttcaattctctgccttttcttttaagtcttttgctcaaatgatggtgagtcattacagcacagcttctgtttcaaatattagtggatcttattaaaggaactctttccccctcattatgaaggtaatatatgttcatcagaggaaatttgaaaatgcagaaagttataaagaagaaaatgattacccatcggaccatcactcaggaatgagcataattaacattttggcatatttccttccatttcttttactttgcatatattttttattgttcccattatactatatgtgcagttttgtgccatgctgtttacacttaagattgcatcttatggttatttttcttaggatgattgtatcttgtggtaatttttacacttaggattgcatcttgtggttattttactgtagtttatttaagtgtcttcctatcactggagacttaatttggttccagattttcgccaccataaacaatgacctaaaaactggtcttatacagataactgtcagatttctaattatttcacatcatagatcattgatgttgaattattaggtcaatgggtaggtataaccctcttaaaaatttggaaacattgccaaacaactctctcaaaagctagtatcaatgtatactcttgatggcagtgaagaaagctctaatagactgaattattgctatcatttggtttcctcttatcattttgtaatctttgctaatttaaattggtagattagaaagtagtgattgaattttgtattttgcatctttgcagagccaaatctcaaaatacccaggtggacaaagtgagggagggcacagaaagaccttttggtagttacagggtttccacgcccaataaaataactcactcttatataaaaagacattgatttttctatttttactctaaaagaattcacaccatgtcccaaaatgttcattagtcgtaacaaagcaagcctaaggctttcccttgaaatgaaaatgtttattataatagcaaagaaagaaattaggttattctgaacgtatttgttcttagtgattacctgctgaagtccagtggtgattattttctttttcgagtaactctcaaattatccctttataatgaaatgctgaggagcagcctcttcctacaagtctctctgtctcttctcctttctcaacctctctctggaaagacttggagcatgcgcctaccctcacccttgctctatcattaagctctaggaatcctgttgctacgtttccttactggcttttagaaagcagaagcaggtatctgagtgaagcccttgacttctgagcatgcaatgggtgctgctcctctgaacctcatccagccagagatatctagacaagtctgaagctctgtgttgccttcgacctttaaaatctctactcctgaacctattgtctaattatatggataaacatttttaatcttacccaaaaacagtaagctcatttctagagagagcttacaagagcggttgaactgctatccttttctcatccctagagccagaatgaagataaattaggtttatgtgatgccaggcagcagtcagtaatgtggcacctgttttcctccaaaggcacatcatgacatgtttctgactctgatggagtccttgtagtatatcctcccaaaggttaaaaatgaatagagtgattgggggtcaggagcccactgccttagccttcttcaccagctttctcatctttcaaccatggccagcaagttttttttttttccctgtatggactcacagtactgtggttttggtattggcgcccacgctgatttgggctaatcccagagaaaaatatattgagttatgcatttttctttggtaaatctggccatgtctgacttaatgtaagaaatctgcaaagtaacattgaaattcctcagtcattcctctcccctccatctttgacagactcacgtattcgctgtgttatacatttatttacccgttaattttaggaaatgtgaaggctgggaagtcttggttctcttactgcttgctttatagtataagtgtctcctttgtgcttacaatgtgttatgttcgaggagagggtgctgaagaaggagagtggcagggtgtgatggcgtagggattttgtaggtaaagaaagaggcattcatgatttcaacagctaagatgagaattatcttaaggacagcacattagacacctttttgctcaccttatcctgctcacccacaaagtttccttccagctctgaatgccatgattgatcataaccttactgagcacagtcagtatggtactttgtttctatgtggtttctcttttggagtcctaacacattgccttgtgctaagtatttgccctgtatgtatctgagccgaacggtttttcttctttcatttttaactcacccatcagtgtaacatgtcttacttcctagatggacttgatcacgtctacctaattaaatgtcctgttagacattctgccgaagtttaaaaaggtacagtttgtatatatttttacttatgttatttttgttagagaaagggaaggaaaaactaaaataagataaaattctttgatttgcttttaataactaccctttgggatattttagaattgaagtagtagctatatatttgtttttaattattattctaaaattgaaaggaacttgtaagcaagcatgttggtgatgacgtgtcaggtgctgaagtgaaattgaatcatcttttatgtcccaagcaaagcaagagcaccatcacaaacatccttatttccatcttttaaaacccctcaaaggcagaaatcttttttcattcataaccagtcaaaagcatgaacaacccttctggatacaggaggttcccaggccaacctcaaatcattaacgaccaactttgatattggttccaagtctttcaaatacatggcggtttggcagtcagatacaagctctatttttgtaaaaagccttttcacttctctgttcaggtcatttttaaatgttttattaatgaccacatcaacaggctgaaggaggtcactattgctgagatgcagataaaaatgagtattatggtttttttctcccagttggctcagtgggaaatcctattagtgctctaagaagttatataattagcatggcacccgctgctcgtttgttgagccaaactggtttttaatgttcagaatacaaaacatggcagggccatcttcataatgctctgtgctgtcactggttgccaggagcgtttctgcgtgaccgatccataataacagcaatgatgagagccacaattaaatagcaccctgtgtttggagcactggtccttcaggtatcccttagtccagtgagttcctgaatgctggagagtgtgtaacatcagtgccatgtgtgctctgtcttctggtgcagaggaagagagttaccagcaatggtggccagccactggcaaaatgggtgcttttcttccatcccttttttcgtcagagacttcctctgatttgacaggatcacacactttaagcatgtttcagtcttctatatcttctaacttcacatgaacttggctctttgatttcaccaaacaaagccattactttaaatttatttataagggcaacaattattagctggattatcagaaaacttctcagattctcatgggcttgtttcactccctgacaattatcaaggtaagtcaatcccagtctctttgtttcaaaccccaagccagagtgtcagtctccacctccacatggtcagggcctgtttactcaagcaatgctgggccgcttgaggacatgcaggggcctgcctcccccaaatcttgttatgtatgttgggttcattgttagcagctgctgtaggactcagtggaggatttgatacctacactcttgtttaggataggtgaagggatgagacagaaaagatctcagggcagggactaagattggacttgtaaaacacaacacctaaagattatacatattgctgttgatgttttttcactaatactgagtgcttgcagaaggcactgtccatgccttctcctcatagttatgccatgaagtagttcgtgtcactaccttattttatagatgaagagagaaagacttggaaagttaagtaaattgccccaaggtctcatagctcgtcagtgttacaatccgtatttaaactccagaatgttatctccagaaaccaaggtaggacaggctgagtcggcctaagcaaccaagtactttgtgctctcctttgactcctcttgatgaaaggataggaaaggagtcagaaaagaggctgttacaaggagttatgctcccctgccttctctgttcaaataaaataagtgtattgtacacttcagaacagcctgaaactcagtgcacaggtggctcaggaacagcgttttagagccataaatgtaaagcttttgtagccatccagagctctgctacatataccaaggccagagtaggccacagcttctatatattgagtcttgtctgagctgaacccaccatcccaaatgttgactgttggctcactgctcaggaggaatagtttcgtagccggaagtctcttcaatggaacagagccctttacctttcttagattttgtcctaatgcgatatttcctctattgagcatagctctgacctgcaaagcacctcaaatgctctcagcccagaaactcttttttttttttctttttgctggtgttacttgagtgtttattaagggttaaggttgctgacttccgtacctagaaatgttgtcaagtatacttacatttaatatactgccatgcatcaggtaaggacgactattgtatcccttgattcagttcaacttcatgaatatttattgggaatgtacttatgttggcagacctgtgccaggttctttaggggagagagactacccaacatcttagctcctctgacccatctcttgaattctgtgtatttgccaaaaaggcttataactgttaacctttaccatccttttatttttcaaatgaacattcagcaactcgacttcttcttaaaccaagtaattttcttaaattaaagttgacagagaatcaatggttattttattttgcctcagacatagaggaaagctctcctatatgttacccatcggggaaagggccctcttatcttttccttcagagcttctttcctctctccagtcgcaggggcactgttttttaggtttttgttttgctttgtttttttgtacctcctttctgaaaagcacgtctgtcactttactgtgaagaggcaaatagcaggttgtttgcaggatgcactgtatatacacttctgaagagtgagaacttgtctttgtccagcctgacatcctttattaaatttttactcaagaggtcaggaaagataagctagtcttaaaaacttgtcagaagtcaacggtttaggtaaaggacagtcattgaagaaaccattatgaaggaaattgttgggtgtatctttttcattagttattcttaggtatggaaaacacattacccccacagtcttgttaagtccttaacttggtggtacagttacacccctgggtgttgcttattcaacattctcaaagaacaagtttttcaaatcatccaaatgtgagttatggctctaatcatacagattccatgactcatacacaaaaatcagctttattatttgataatcacacggcatgtgtttaaacactgaggaaaatgttttgagcgtttgaaatacgattacatattataccagtctgcttttaagtcttgtccttggatatatccttcatggtggagttgacattgcaccattgaagactatatttcatgaataagcacaagggtttttctacttttggcaaacttcaggtgcttggaaatttccaattagggtggctggtatctatgccaagtgattgatttcattttatttactttatttggaaccgttgaagggatgatgtcttcccaaaccattgtaataatgagtggtataagttagtgttccagaggccgagaacaaatttagtttttaccaaagggacaaatgttgacttttaaatatttgtcagaatcagatagtatattagtttgctagggctgccttaacaaagaaccacaaactgggtcgcttaaacaataggagtttattttctcattgttctggcgcctagaagtctacgatgaagctgcccaaaggtttagcttctcctgaagtctctctctatggcttgtagaagaccttcttgctgttcttatgtgatctttcctctgtgcgggcacatgtctgtgtcctaatctcttcttataacgacacctgtcctgttggattagggcccaccctaatgatctcacttaactttaattacctctttgaagaccctgtccccaaatacggtcacattctgaggtactggctgttaggctttcaacatgaatctgaactgtgtgttcagcccataagaaatgagaagggaaaaggcttcatgtggtggccacttctcagggccactctgtgttaataagagttgtgtgggcagaacagcagtggggcttaagaaggggcatccctgggaagcagataaggctgagcttcagatttcccttctcttacttgagggaatcttcagatttaaaaagaaaatagattttgtaaaaaactgacctggaaacagtgtcaggtatttgtcgtctctttaaatactgtcatgcaaatcataccccttctggtacccttgcccttctgggagatgtcaccctaaaaggggctttccaagctctgctctcagctttcaggcacccactccgctcttctccagggcaggccagaggagtttcagtcctgtgagtgttagtcattggagaaccatgtaaccccaacctccaaaaacaagcagatgcattttttctttctttttgccttgagagaatctttggatttttggtttgtttagacattctgcatgaaaagtcctgtcctcatccggtctcctggcaagtgtgccctgatgtattctcgtgcatggatgtttccttctgatatacattaacaacctagcaaatgcctaggaacaatgttactttctgtgcaactatgtattttataaataatcatttgctgaagtaatttcagaaaagttgaacttgaggatttatagtggctctgcccaagggtcattcatcctagactgtaaatgcagttacttacaggccttttacctgaagtggatcaaaaggggaaatacttgctccatctcattcatcatcaaatttaattatcttgcagtaccacctgtggaaaagtcagggggattctgcttacatttctaccctggaggacactggcgttaacacttcttattaattagttcttcacagttttttcctttgatgagtgatcattttccttttaaatttgctaatctttaatataatttcccctggattcgattacacatatacattaatagtaaaattacaggaataggaaaattaaagtatgtttctatttctgtgatttcttggctaaagtttaaagaatgtattgtctgctcactttatattttttgtgatttatgctggttctctatggctaactcacttgattaatcacacacatctttaaaacttttaagcaaaaaaaattacttcttccctattctgaagcaacaaaattgggagattattattattattttgagacagagtctcgctctgtcacacaggctagagtgcagtggctggatttcggctcactgaaagctccgcctcccagattcatgccattctcctgcctcagccttccgagtagctggactaccggcgcccgccaccacacctggctaattttttgtattttttagtagagacggggtttcaccgtgttagccaggatggtctctatctcctgacctcgtgatccgcccacctcggcctcccaaagtgcttggattacaggcatgagccaccgcacccggcccaaaattgggagatttagctgagtacatgtccaaggtgttggccagacacagaacttcctttggaagttgccacatccagcaacccactctcttaggtgttagccaccagctttccaagagaggacataagccagtctcctgcatgttcatggcagaatgttacttctgcttcctacagatggtttagctaaggggaaagatctatgtctaatcagtacatagactttcagaccccttcaaatacccgtcggagaaagcagtcatgaaatcgccctttgtagcacttgacaagacacttttggggcctcaggaagaagtgtgtataggcgatccatttctccaggttctttgagctccctctgttgaggtaaatcatcagtaaacaatgtgcttctgatgtattatttcagctcccagcagaaatgccatcactcaggcaagatttaatattgtgtcttcagcacctgggagaaaaaaactttcatcgtttgcaccatatggttgaagacatttatatgaaaaaggcttctgtcttttgtaacataagttgaagacattactcagtgtcccttataaagggtcttccataataaaattttccctgaaattaatgccaagataaacaaaatctgccttgcatgtttctcttttgatgaagttagaactatactatgcaacagtttcccttttctgccttagtttcaggcaagtaaagctaaatccggtgctcagttggagtaactgacatctcaagtatgtactaatgtctctttctgcattccttttaattaatgtctgttatttttaacaacaaaatgttcagttatatatttagtttaattttgaaactatttaacatccttcttgcaagaattaaaccaaataactagttggcaaaaaccataattgtccttaatagttagagtttgtaacagtttgtgccttaaagatataaacttctattgtcttaaaaatgcatttatctcagaatgtaccaatgtgtgcagctccacccacctcgccatatactgttcagtttgtataaatacacctactaagacatgatgtctgggtcccaaatggacacatattaggttcatgtcttatagatgcctttacattcctgttagaaagtacttagcgtgttggtttgggagcctcatgcatgggagagaggtatacatcacagagacaatgatgagtctgtgagttctctgcagtaaaacccaccacaccctaaacttaaaggcacaaataatgttaatgaaggctggtcctgtatcagttgattgaaaagaacagtgatctacagagatccttacatagtgagcatgattaacattttttcctgctacaaaaaagtgtgaactttgaccagactatcatgtttctgctcctacctgccattaacatgagtctggtatttatatgattactccttttcccctttgccccataagtgaaaataagttcaataaatatattcactagacatcctaaatgctgaaaaggactgcttgctacatgtgacattatagttccataatcttgacaggaagcagcacccttacacaatgacctgttctctcctgatttactatagctgggatgtaacacaagtgactttgtgctgtgtaggtgaaacattcttaaaattttatgtattcagctctgaagtaaatatgacaaaatattaccatttttaaaattctggatggtaggcacatgtgtattcattgtattactctttgcacattcctgtatgttgaaatgttttttataatttttgaaactattatgtaatagagaaaaaaaaagagtccaccatggttgtttaggttgaagagtgggtaaggttagggagaggaaacagccatgcccttcacctggcaggcatggagattttccagaggtttctgtcagagaaaatcaccttaacttagtttggattacttctagatgaaaactctttttcgtagctagggaagaagtctgttatttatatttctgcatgcgatttattcatgtgtcagccctggactgagtattagagatctctccatgaaaggctgacatgtgtgcactgctagtgtcggtgtcagctgtgtgaaatcctatgcagccagactgtttgctccctgcaggccgcaaacctaaaagggtccttcaggctgtcaggtagccagcgggaactgtcaagagtctcaagcctgaggttccagttgcagaagaacctgcagttaaccagtgtgtgaggccaaattctttaaaatatgttgagatatcttatttgaagaaaaccttgtgcgtatttgtgtatgtgtgtgctcatgcacacacgtgtgcatgtacgtgtgtgtacatacatgtgtatgtgtacatgcatgtatgtatatcacttagtctctgcttttgttgttgttaaagggaacagtgtgactttctgatctatctgacattggtttggggctgtgtgatgctgcatggcttgatgcagactagaattccagatgctactaactacattttctaggccaggggcatatttctgcacgtgtggaggtgcacgctgaaaggaattttcactttttagaagactcactgatccaaaagacacttttgcagtaagttaaatgtaagggcaagggtttggaggggaggggaaagtatgtggttcagctactattctcacagccttggagcatatggcccatggtggctggagatacacacatccaggagagcttcgatttcgggcaaggctgtgggccacagtgctgataggttcagcagtggttctcaacctttagagccacagatagagggcacaaactgtttcctttcccctaccttacccaccctccaacctcaacaaactcagtggttcttttttcctctagtatataatactttcaaaaattataaaaaacatttcaacatataggaatgtgcaaagtaataaatgcacatgtatctaccatctagaattttgtgtgtgtgtgtgtagagaccagatctcacggtgtgtcccaggctggtctcaaactcctgggttcaagtgatcttccctcctcagcttctcaaagtgctgagattacagacgtgagccactgggcctgacatagaatgtgttaaatggtaacattgtgtcatattgactacagagctgattatataaattttaatttctgccatcatatcaatcatggaagacactttcccgtctatagtgcctctcactgcatgcagcaattcttaactgagtgcaggggtataactgggggaaaagtcttccttttagagattgcacctcccctcaccctgcctgcagtttgagagccatcagtctagaataaagagcagtggtctagaggtcctgagtcccaggttctgttgtcatttcttccgttaatggctcctggcacaaacctgacacatagtaggtgatcaataatgatttatggagaatggcatgaattaaccagctgtgttatcttagacaagccacttaatctccttggcttcagtttcttcacctaaagaatcagagaaatggattaggtgacctctaaggcctctttcagttgtaaaattatatgattctgtgattggacctttacctcggaggaagattaatttgacaggagtgtgaaggatggatcagagtgagagccaagagaggggaatacacctttctctgaattagttcaagatttccttcgctactagtattttttaagcacttacttacattgtttttccctgtagtttacataaactgaccatcattttctgcaaagatcggaaacttgttaatgactggaactatgactttttctccctatttctatgtgcctcaaaatatgaggcctaataatggcttatagcagtagcacagagttcatacagtgttttcacacagcttgttaaatctgcgagggaagcattatttcccctttttactgcagaggaaaccgaatgttggagaggtgaagtggcttactgaatgtcattgctggtaagtggattaactccaaattgggctcagctgaccagtcttcaattcccgaaggagtctccagttctgacgtgaagacactgccataggaaggccccgggatgagcagggatactgcttcagagcagccgtcagcttggccacaggaagctgcccctttcacttcgtggctcttttatttctggccttcatttgtaggttccttctgtgtatcctcatattgcctaatcttttcatgtctcattaagtacaacaattttccctgagggctgcacattcgtctgccaaggactattccctgaatagcagctccctcaaccttttacagccctttttcctgctgttgtatgtctttagccttagcaaaagccatgtatacgtgtgtatatgtgagtgcatgtgaaatactctttacttattcagtcatttcttctcatctgtggtagacgatggtggcctgaccttggtcagtagcagtgaagtttgagagaaacggatgatacgagaactcttacagaggtataacctacaggtcttgatagtgggccatcactatcatttactgccataaggagctaaggaagggaaatgtatctgagaggaaaagtgatacattccgttttggagatgctgtgccttttggtgtctttttggacattgcattgagagataccatataggtagttgataatgaattttcagctctggggcagtacctgagattgagttatggatttggaattaatcatcaagggagagaatgagaaggggaaatggtgagggatggaacattaacactgaagagacagccatacagaggtagaggagtgtttggggcacacagagaaagggcagctgggggactggaggagaccagaaggaggtggtattacagaagccagggagaggcactttataaaagccagacttgtaaactctgcattcattcatctgttcaacaaatactatctgtgtacccagtaggcgggtaagggatgtgcactggtgaagataatgggtaacattttttaaagttccagctttagttcagctctgttgttcagactgtgattttggatctattctttatcctttctaagcctcagtttccttgtctctaaaataatagaggataagagcagttcctgctttaagagttgctttgagtttggactgagataacatatgtaaaacatcaagcatgtcccagcagataggaaatgctgttgtcttagtccattcgtgctgatacaacaaaataccatagactgggtaattcgtaatgaccagcaatgtattggctcttggttctggaggctgggaagtctaaggttgggggctgcaccatcttaatgtcttcttgctgtgtcatgccatggcagaagtgcaaagagagggtgagagagagcaaaagattaaactcacagcctcaagcgcttttagaattggcattaatccatttgtgagggtggcgccctcatgacctaaacacctctcattaggccctacctcccaacacagtcacatcagggatgaagtttccagcacatcctttttgggggagacattcaaaccatagcagctgtgaattattatttccccctctcacagttgaggaaacaggttacagaaggccaaataagtagtttgtggttttgaactcagatccccatctgcatgggtcacattatctcctcatcctgccccaggcggcctcctcgtgtgaagcagaagtatctgcccagctcactgggagccacagtccatccatttcttctcctaagactgtggggatggactttggtttggtgcccagagtaggacaagaggcaagctgaactaaaaatgatgtcctgaccaattcctagcttagcctttttaaaaggcccccttcctactcctgatagcggggagatagtccaggaattgagtgtgtgggtatccctttgaaattccctggacactaacagctgcaccttcacctggaatttcgggtaaaagtaaggaagaagagggctgttgatgagaaatcttctgctgcttaggagcgagcagctgctcctgggtccctgggaaacactatccctggcactcttacagagacccttggtggtgttgccaacctcaaagctcggggaaatagttgcctttcatcttcatttgagagcatccctgcggtggagggtatacaatgccagtgacacttactgtttctgatgctctttgacaatgagtggtctttggatttctaccgctttaatcacatctgggtcttagagtgtgagtgccctcatactgctgctggcatgggctaagagacggtaatgtgaggctgaaggatgcaaatagttctgagctggcattttggctttggagccctccaggagcaataactctgtcagattgtcctgacacggtacattaagaggtgcagataaaagctacatcctgtaaaatatatacttcaatcgcacctgccttctgcacctccaccactgggaagggatgggtgtccgttcgtgttctgcattaccagcctcttagccagctgcctcgtttgattgttcgttgtgtcacttgaagatgaactgaaagaacaagaagaaaaacttaatgcacgccaatctgtatctctgaacttctcacgttaaatagacatagcaaaaaaaaaaaaaaaagtttgtcagcactgaacatcaattactaaacatttttttaaagtcaggctgggcatggtggctcacacctgtaatcccagcactttggaatcctgaggtagggggaatcacttgagtccagagttcaacaccagcctcagcaacatagcaagacccttgtctctacaaaaaattaaaaaattagccaggtatgggggcacatgcccatagtttaagctgctcaggaggctgaggaaggaggattgcttgagcccgagagttcgaggctgcagtgagcaacaagtgtgccactgtactacctgggcaaccaagtgagaccttgtctctaaaagaatccaaaaaatgaaaaaaacgaatttcagttttataagtttatgaattgtattttcttttcgttaggtttctgtggctttatttttctttcccatgattaatttctcccatgccttcagtctgtgggtctgtgtatcatttatttgactctttttagtagatccttaaaaagaactttgaagtttaccatttcagaaaacttcatccccagaaatcggtttattactatcagcagaagttatattttatatttgccctcactaatgaatggtaatagactgaatctggcccacacattagtgtgaacattttaaaattagtatcaacaattaaaactatggaatgtcatataaaatttcaaatttcttttttctctgacaaatctgaatattgagcaacattgagtccaatcctgtctggccataacctgcaggcactgaatagtggttgtcccctttagatggggaagaagctttccagctggcacagtccccacatctccctggttattaatacattctgatttattcaaagttcctgcaatagtgcttacaaatggtgggtaagagcataaatgggtgcaacttaaatgaaggggaatttcataatgtgtgtcaaattacaaatgcatatatcctttgaccaaagaattcacctctagacatttatttttatacttgtatttatgcaaaatgacctaagaataaggttacttattgaagcactgtttacaatagtgaaagattggaaacagtctgttcatagaatgggaactggtgaaaaaaggctgtagcatcccagagaaaactatgtagttataaagaaaagaatgagaaaactctctacaaactaacatggagaaattccaagatggtattatgttaaaagagaggcaagatacagaacagtggatatactatgctatcatctgtattcaatatatatgtatatttgctggtacatgcataaaacatctcaagaagtatgcaccaaattcataaaacactgattgcccctggaagggcaaccaggtagttgggtgacaggagtgagagggccaattttcacagaatatttaatgccctattgtaccttttaatttttaagccatatgattgtatcacctacttaaaaaaaaaataaatgtcctttctgagttctgtatgtatttgcattttcagtgcaatgagctataagaggctgtaccttaccaaatttaagagtttttattttaagattaaaaggatttttaataaaaattatcaaaggcagccgagtgttgaaactgttactctcaagtttttatcatttcctctataaagttgctcagacttagtttctggccttaaatcatacctattttcagcttccctgaaatcaagagtgtcctgtgccatatcaattaaagtaaatgtactttcaattaaaggtgttaagtatgagtctgaaaagattaattctttataaaaagatgaccttcagtagttcgctccaattaggcatttttccaactatatttcatcttgatgggacaagtctactactcacaatcaatcactgtgatcttttcaaaggcgagtattttaggttcagagtcataaaaagaatgacttgactacgcagcctccataacttgaaccacaggtgatataggcagagattatgggtgttggatattactttttgtgttattaatatttgaagcatcaggatatgcatagtgatattctgggtacagttcttacacctctcttctcatgaccttactagaataaatatatttaaataagactgatggaaaggaagagaggaaatgaacaatgacacaaattaatgtccaaccaaattcctcatttttttcctgtcattttattattaaacacattataaatacttgctttcctcatggttgttttgttattggactactttagtttgaagtgaatcattgctcatatacagcacataaaaccaagactattaaggaaatgaatgcttggtgattgttttatgagaacatgcaaaatcttggggaataacattgctttctcttaaaagttaaaggaattgagcatttctgtttgtatttggtaccttcagtatggaattattggccttcactctgccattcattaaatttgtaaacttggagaagccattgaacacagtcatggaaaaaatggaaaacaaataatacctctttgcatatctcaaaggttaattattggaattaaatgagattatatatgatatataataaatgattatatatgatacataatctcatttaattatatataatatatacatatatgtgtatattatgtgtacatgcatatgtatgtatgtgtatacatttatatattagtgttacttaaaatgtagtccagtgaccctgggagtctttgagaccctttcagggagcccatgaggtcaaaactatttttataatagtagcaagaaattacttgcctttttcactctttcacacatattcagtggaatttttaaattcctgtgtctgtaacattcaacattgcaacagcttgcagaaacaattgtaagattcgagctgtcctaagcctgatattacagaggtttacaaaactgtgaagcaatggactctttttcactgaattgttttcattttgaaaaggaaagtaatttttcatataaaatttatattgacatataatggggttgtcattttcaaattaataaatttttttaaattgtcaattttaatttctaatatagtaaactttgatagatatagtccacataaacaaaatctctttaggggtcctcactactttttaagaacataaaagtgtcctaagaccaaaaagtttgagaactgctaatatatatgaaagcactatgtaaatgtgcagtggtgacgttggtagtttattaagaaactttgccaggcgcagtggcttacacctgtaatcccaacactttgggaggctgaggcaggctgatcacttgaggtcaggagttcaagaccagcctggccaacatggtgaaaccctgtctctactaaaaatacaaaaaattagctgggcgtggtagcacactcctgtagtctcagctgctcgggaggctgaggcaggaaaattgctagaacccgggaggcagaggttgcagtgagccaagatcttgccactgcattccagcctgggagacaggcaacagagcaagactccatctcaaaaaaataaataaataaatataaagaaagtttaagctatttaaacagtgcagcacacaaaccatcctcccactgcaggcactgttgtgaatggtacactccacctccagggcagggttctttagtctggggtccaacatgatttctaaatcctctgtagttacctacaattttgtgcataagttatgtgcggtaatccctccatatcttcgcaagggtacgtttcaaaaccactgtgaataactgaagccaaagatagtactgaaccatctatgcagtatgtttttccctatatatacgtacttatgataaagcttaatttataaattaggcacagtgagaggttaacaacaagaactaataataaaatagaacaattacaacaatataatggcataaaggatatgtgaatgtggtctctctctctcagaatattttattatactgacatgggtaaccgaaaccatgaaatgtgaaatcacggataaagggggactgctgtatctactttcttttagggtgaggatccacaattttcacagttttcagatttccacaggtcctaaaagaagcacagttataggaactgcggcagtccctggtcccattttagccctgaggggagtagtgataaaagtcaaggttggggaaacctgaagggagatacaaagttcaaggtccaaggctctcatatctcggtgtgggcttggacatgtcttgaggtattggccctttacttctccctgttttgtttatggaaaggtgtgagacttgggctggctttctagacactgaggaaaagggcattctttcagcaagtgccatgccctgtgtatccttgtgggcctccttgctcttagtgtggttggatgtggtaggacataaagaaccaaaatcaggctgtggaccaaaaagggcccagagaccagcttcattgtggtttgggcacagttcacagagaccaggaggttttacacagagctttacagtgcgaatgctcagtttcccagctcctcaggaggatgttcagggatgggtattcaggccatctctgactctgtcttagacattttcagaggctcagctaatactagttcatgtttcctactgcaatttctttctttctttctttctttctttctttctttctttctttctttctttctttctttcttttctttcttttctttcttttctttcttttctttcttttcttaaaaatgagatgaactcttgctctgccacccaagctgtaatgcagtggtgtgattttggctaactgcaatacctgccgggttccagttctcctgcctcagcctcctgagtagctgggattacagggatgggccaccactcccgggtaattcttgtatttttagtagagatggggtttcaccatgttggctaggctggtctcgaactcctaacctcaagtgatccacctgcctcagcctctcaaagttctgggattacaggcgtgagccactgtgcctggcttctactgcgatttcttaagatgtttttattaaccttaattctagcatctgttgatacttataatattttagtgttcttacaagaagttgaaactattctaattatagctcactgccccttattatcatttcttaaaattaatttgaatggaaaacttgtgtctcagatatttatgtatttaatatctccccagtgccatttaatttttaaattgcatatacatgtatatttttcagttttgtgtaagcctttacatttacttaaagttttatatattcatggggcaaaatgttgcaaaattgcccactgaatatataaaacttttaaatttagataaaattttaaactaccaaatgcatacctttctcttggtgttgtgctacatgatttaatgtgtagtgcttcttgaattctgtcactgagaccgtcttccctgtttgtttcacttttaaaaatgatttaataaaatagtatttttcaagaaaaaaaatggataccatttattttagactaaaggcttctgaaatttttaataaaattatattggccaggtgtggtggctcatgcctgtaatcccagcactttgggaggccgaggctggggggatcacctgaggtcgggagtttgggaccagcctcaccaacatggagaaaccccatctctactaaaaatacaaaaaattagccggacatggtggcacatgcctgtaattccagctactcaggaggctgagacaggagaatagcttgaacctgggttgcagtgagatcacaccatcgcactccagcctggacaacaagagcgaaactctgtctcaaaaaaaaaaaaaaaaaaaaaaaattaaggtttcctgtttagtgcagattttataaaatgaacattttgtttttggaattttgtgatataagcatgtttatataaggtaaattcaatcaaattaaagaaatctcttcattattactgttataactatcttttccagttaacaaaatacttggaggtaacctcaaactgtaaaatgttatccacatgttagtagcatcttgtgaaaatctgaatacatgtagttcgactaaactctgcttccctagactttaatgtattatatgttatgtatttcagaaactccagaaaggaacttaatgacatacgatttgagtttactccaggaagaggtaagttttaattgaagttattattttattgcctcaaagagcattgcagaaattgattacaagcatgtggttataatctgctatttaaaactgctttgtttaatagtgaaggaaggaaggagagatagacagaaggaaggacttttgatacttctaaggattccaaaccaaaccacagctgactacatgaatctcagtgacacatgcggcacagtatacataccaatataagttagatatattagctcaaccatgaaaataagtattgctatggtaatgcaggccctaaaggaaatgatggtgaatgtgatgagaagcataccacagtcctaatgagggttgagcagcagtgggatcatacagaaaggtaacatactttgcttctgtgatctcagctcagattacgtgaagtctctattggggagtgtttactaaaattttgaaaactctgaagtacaagaactttctagcttgatagctggtccatcagtaaaccctttgaccccctctgcggttattacctgcaggaagacacaaactcagatgtccacagaagccaaagtgaatggtgagcacttcaggaaactggaggatttcctatcttatttcacccatgttcagtagtgttgttttttttttttttttttttttttttgaacaaaggccaccagccaaacaaaatattcctgggcaatacttggccataggcttattggtccctgaatgctagtcttctgtaaatgcaaagatttcaggattcctggtatatttgaattaaactaaaatatgaagtatcttttaaaaataaatgtacaggccaggcacagtggctcacacctgtaatcccagcactttgagaggctgaggtgggtggatcacttgaggctaggagtgtgagatcagcctggccaacatggtgaaaccccatatctactaaaaatacaaaaactagccgggtgtggtggtgcacagctgtagtcccagctacttgggaggctgaggcaagagaatcacttgaacctgggaggcagagagtgcattgagtcaagattgtgccactgcgatccagcctgggtgacagagcgagactttgtctgaataaataaatggacataaagccctgatggatttgctaattgatctttctttctggaggtatccatctttgacaatttagagttggtttatgaagttgtacagcaccagctagtgttgtcaaaaagctatctattttgtcataatataaaaatattgaccaggccatgctgtgataaaatctagtaattatgtaataaatgcttcaattacagcaagtagaaagaacagattcttattttaagattgtttcttttcatctgattgtttaaaattgactatggcaatgaaaatcaattttaattttaagaggtaacaaagaagtgaatatgagctcaggacttttgtgggtaacatggccctgtcagcattactggaccatgggcactggctttggcagccgcttttgccgcatttagattaacagtccctgcttctgttgcacagacagaacccatggcattgtctgcctaatgacagccggccttcactgggtggcagagcacaggcccattgttaaaggaagtgatgtgcatatatcactgcacctctgtgactattgatgctgtctgtattctagactttgcttacagtaaatctgtgtgcagttcacatgcattatgcttgtgctgtatatacatgtgaataaatatatatggcacaaaatgtataacgtaaaatattctctttcctcacttgaggacaagccctttgtgtttagtgtgccccatgtgctctggaaaccagaaattaatacatgaatatttatcctgtttaggcaccagggatgttaaacagcttaaagaaaaatagattactaatgaaacatgaaataagttatttcacacttctgttctaaactattactagtatcttacttacatgcatacaaaataattgcctaatggcacgcacgcagatatggaatatttcccatttggatcagccagcggtacctgtttgccattttggtatgactcatctggtgcccaggagtcctgaaaacagaaggacatgctgtatgctttaatcatttgggaatgtcaatcattttggtactgttttagtgctatccctcagtgcagctttgattatttcatttttggctacattctgtgattatagctccttacttaagtgtaagatcttactgatactttagaagtgatgggtaacacatccagatgcttcagcagatgaccaatcagtagaaagataatgaatgactacctgctatctgctcagtgcctactaggtgttaggctctttaattcagttcacttatttccctaaagatttgggtaacatccaggaagatgccagttatgagactgaatgttctagcagcttcagaaagctaaatcatgttcagagtagagcctcttattatgctaccccaacttccattattatgggatcattttatcatgaagagactttataaggtgttttttttttatttttttcttttcttttttaaaaaatagacagggtttcactctgtcaccctgactggagttcactgcagcctcgacctcccaggctcaagtgatccttccacccagcctcccaagtagctgggaccagaggtacatgccaccaggcccagctaattttttacgctttgtagagatggcgtctccctatgttgcccagactggtctgtaactcctgggctcaagcagtcatcttgccttggcctcctaaagtgctggaattacagatatgagccattgcactgggccaaggtgttttttgtactgctggcaaaaagggcaaagcctaagacaagctcatcttacatggaactttatagtttagtaagattcctatatatttatttgccatttacttcattttattccattttattatgacttcattatgaaatggaatcagtaaaatggcagaataccacagtttctctggaagtataaagtgtaaggtgtgtttcaaatgatctttggctgctgcatcatcatcatagttaccatttattgagtatttactatgtgtcagacactgggcaagctctttaaacctcaagaattgtgaaacagaaatgtacctccagctgcacactcacatgtatatgcacatatgcaaacacatacacacacacacacacacacacacacacacacacacacacaccagcccacttacatagtcaccacatctgaagcacagatgaaataaggaaatgcagtttatggttagggcagcttttggtgtcacaaaccgcaatttcgtttagatgctcatttgatttagcagctgtactttcaggtgccccctgactttggaagacatttctgtcaaacccccgtctagagtgttacagcctgctgagccagtttcttcttatcaagctacaattctaaatatttgtgagaatatctgaagtccctggggaccaagtcagctctcttgaaccgagtcagctcccttgtaaaaacgtgggggcttataacagttcttctgagcaacttgcaatttatcaatttccctttacaaagccttcagatagaagattagtgtgatcatgttcattcgtaacctttcaattaagtaattccagctgtattcacttgccgcagcctctttagtcccatccttatgagattgcgaactcctgtcacttatcattgagaaagtacggtattttattcaaccacatttttctaagacaatgtatctgttgctatcaaatgatcagtgtcatgttaaaggagtttcttaatagcatacatttaaattgctcatcttaatagtccaacaagctcataggctgtttgtacaaaatacaaggttatatcagatgctacccattcaacctttgctgtaattcactccatagctactaatgataaaaaaggattgatgatggtaggtgggattaaccttggcaggaaagaaaagcagtgtcatagggaacagttataacttctggaggtgcatttgaagattaattcagatagtagccagagggcacaagttttttagttcgccaaaaatagaaaaaataattttgcataacttctgttgaataaatagcaagatgcaaatggcacgtggcaaaatgtatttcatgttgcttctgattttctcctgatagagtctgaattgttgaattaaaactcatgggcgattttagtaaatgaaaaatatatattttacattgtactgggttgttgatttttatgttatggttactaatacatattcatttcacatttggacagatacagcagatggtgtatctcaggagctcttctctgctggcttggtggatggtcacgatgtagttataggtaaattgttttttagtatgcactgtcattttgttggtatataaaatggaaatgtgtttggaagcaaaagtgttcattaaggaataattcactctgaatatttgaagaattcttcttgaattcttatcttttatgtagaagtatatttaagaatcatatttggacgggcgccatgactcatgcctataatcccagcactttgggaggccaaggtgggtggaccacctgaggtcaggagttagaggccagcatggcctatttggtgaaaccctgcctctactaaaaatacaaaattaaccaggcatgggtggtgtacgcccgtaatctcaactactcgagaagctgaggcaggagaatcgcttgaacctgggaggctgaggttgcagtgagccgagatcacgccattgcacaacaaaagtgaaactacggctcaaaaaaaaaaaatcatatttaattttctttttttcaaaagctcttaatgtaatcctgtctcatatatctggacatgatttatccaatgaggagcctcatttattggaaatataacaaagaacttagaagacccaaaagtccatgatgtaacaaaaataagatgctatcaattctgtgcactaaagcatgggaacctctgagacccttactcagagtttctatattctctttttggacacagttctaataaacttagaattcgttttttcagccctcagcaatattcattataaaatctcaggtttggatgggaacttaaagatcattcaggccggttctttcactgtatagataaggaaatgaattccttaagaggttcagtggtgtgtctagaaccatgcagctgggttgtggcagaagaatttcactttgaaactgtgggtctttctacctcctttagaatcataagatagctgcacggagataggggagcctgctcaacataggcctgctgatgggagcaagcaaccacccatagacctcctgacaaagcaaaggaggcagaaaagctctaagaggcagacatagccatctgagaaaatgtgtagcctggttccacctagggtgaggatgaatagctccatgctcttcagcaaattctgactttatagagattttatgatgtattactgtataatcataataaccctaactaatcaagattagttagcatattcataattatgttaattattaattatattaactctaataatgtattacttaggggaatatatattatgataatgccttattaaaatattcaaatcaaaactgatttttgaaatgacatgctccccttaaatgatatggtttatgtttggttttggttttgttttttttgagacagggtctcactctgtcacccaggctggagtgcagtggtgtaatctcggcccactgcaacctccgcctcccgtgtccaagcaattctcgtgcctcagcctcccaaatagcttgggactacagacgcatgccaccgtgcctggctaatttttgtatttttagtagagacagggttttgccatgttggccaggctggtttcgaactcctgacctcaagtgatccgcctgccttggcctcccagagtgctgggattacaggcgtgagccaccactcccagccccttaaatgatatgttttaatttaaaaaataacttattcaaaataagtccttccccaataatgctagagtatatgactgagagggagtttaaggtagatacacacacctatcagaataatttgttcctagtaactttggaatgtaaatcattacaaagtgaattattttatgtaaataagagtaattgagtttatagtgggagattagaattctgactaaagacataatatccagtatgttatttacatacaaatgatatatcataaatgcagatacaaagatacctttataattagaaaaaaacagattttttcctactgattatacattaactctacacattgatttcacaatgaagctccaactcctttgccaagtggctccatacatgaggggacacagacatattttaaaggaaagtgacttaacgtgcatttatgtggagtgagttgtattcccttatatatcttgtctttcacattttcctttacaatcttgtgagatttaaggccagctaagttctcgcctaaattttctaatcaaatgtgagagggaagctgagaaaaaagattgattcaactttggggtctactttaaattctgtctaagaattcattatgttcacctaccaattaccaattccttgatgaagatgaacactctccttcattagaaaacataagtatacacttttgtgtcttagtttaccagaagaaatagaacagttaattaatggctagatcaggagaccctgcaaaccttgaagagagctatggtccatatgctaagcatccagaatagaaaattaatcagcaagtgaaaataataatcaaaaacttctttgaaacacctactaatgtctcctattgggcaagaagccaaggatcagattgttcttttattggagttgatcctggcaggtggctaggaacacagaaaataagagagcttgacggaaaggcattaggtcacatcttcttttaagcatagtccttgcttcagacctacagtcaagtttaatgcacttctttttttgccccaggctcagctaaagttaggaaggttttattgttgttgttgttgaatttttaaaaggaggaaattaaggcagacttcatgtacaacttattgagtgtattttaaatacaatatataaccataaagcttttctttttctatgctttagttaattattcttccaaaaactcttcagcttgccttttttccccttcttggagctaaattatttctatttagagagtgttggagtaagaacaggcatatctaactctttgatatagtagcacttaaaaatgccttacatggacatcacacttaagtgtctacagacaatgtttatgtatttcatttgatcatcacatcaattctataaggtaaagaggacaggttgttttaatcactatgttgtagactgaaaactgaggtccgaagaagtatctagactgttgcaactggtaatgttccttgcgcttgggtcttgttgactccccaatgttgacactttgcatataatttataccttcacccttaaaaagtggatccaggtaattttaaatgttggtggttcttgtgtcccctgggagaaaagtagcttttccttgtttgtttttccatggaccagtggatgttttctattttaattgctgattatttgacaaactaatgtatttgatcttgttccctctaaccaatcctagcaaatctctactccctccctcctcatctatttccctctttactagatatgtcccaccagcatatgaatatgtttttatttctcttatcttcagaaagccctgtctttaccccacctcccattacagctatttctgtccaaccccttaacagctaaacttatcaaagacaattgccctggctttgattcctttcttatcactgtctcttaaatccacctcagtcagacttttgaccttcctactccactcaaattgttcttttcaaagctgtacctggggaaaacacacctgcaaaaaggagtggcagatgcacaggtaggcgtggctggagtgaggggagaaagaaggaaggtaaaggacacgtggtctgtgaatggctgccatgttcctaaacctgaggctcatcctcagtccttatcatgcttgacctattggcagtattgggcgtagttgacaatgcccttctccatgataagctttttcacttggttttaagtctccaccctctcctagttctcccatcttactggtatttccttctcagtcttttttgttggttcctcctcatctctctaacctataaatcttgatgtgtccaaggaccctttccttagatctcttctctttctctacttgctgctttgctgatcttatcaggtttcgtggtattaaataccttccactctttaactcccaaatttatatctttgatccagacttttattttgaattccagacttatattcagctccccttttagcgtcttcacttggaaatgtaatagacatccaagatttaatccacagcttcaaaatccagcccctggtgtttcttcccagcctgcccctccaggaatcttagactcttcataggcatcatctccacctttccaggtgctcaggccaaaaccctgggcattgtccttgacttttctttctctcatacttcacatccaactcatctgaatgtgcccaggatcctgcctttgctcaccatctcacatcccatcacgtttcaagcccctctcaactcccagttgagttcttgtattcatccctttgctgccattccagcttctgtacttgcctcccttcagcctgtcctcatctcaacagccagagatccaggtaaagtaaatcagatgcaaaaggccacatatggtgtgattctttatatgaaatgtccagagtaggcaaatccatggagtcagaaagcagaagagtggttgccaggggctggcaatgaagggggcaggggagtgactactaagtatggggtttctttttggggtgatgaaaatgttctggaattagaagtagtaatggctgcacaaccttgtgactttactaaaaaccactgaatcgtgcattttaaaggggcaaactttataatatgtgacttttagttcgattttttaaaagtaagccagattgtgttcatagttcaatcaaaactctgcagtggttctccacccacaatcaccatggcttccagtcctctgcactgtgtcccctctcacttctcagatgtctcttctcctgctcttccccttgctcaccccaccccagccaccccggctgttgaacttgctcttcttccaggacactccttctttagggccatatatgcccaccccctggtgcttaaatattacctcacaaaatggtcttgagcagcctcattaaaatcgcacaccatccccaactctctaccctctttcttattttgttattctacctaatctctccccattcaatagcctgtatgtttcatttatttattttgtcagctatataggacttccccttgagcatcagttttttaaggccaggatttttaatctgttttgttaattgccacattcccagtgccccaaactgcatttcacatagtaggccctccataaacatttgttagagataaacaaatcccattttgatatatatagatatatcgtaacatttactttagaaacaaaggatactttgagatataggattctagtgttttaagaattttgctttcaagattgcaaaattcaaagtgtttgcaaatatgaaataagttcacctgaggaaagctgtgtaaagaaagagtccagtttatatagaggtttgaatgatttcttacatgtgtattttttctgcttctataatataaaatagctaacatttaaatagattaaaaatctgtttctttcccatcagcattttcttttgaattggagtaaatgcttacagcattgtgaaaggctgaaaaagcaatagcatatgttatggagcagtgaatgttatcagttttactagaatatggcaaacacaggttacaaaaagtcttcaatacctagcttcagggtagcctgcttttagtgtgccgaccttcgcgaatcagaatctggattgaagaagggccagtatagtgacatgaagtgattgctttcgagcagaagcagagcagtgcagaaatgaaatgtgctgtttgtagactgaaatcataaacccacttgacttgtgcttaaactcggcactaccttaggcaagaaacaggaaacatttttaggctttgtgtaaatagccgttgataagattggcaaggcctcgcgggtgggtgttggtttaaaaaagtttgcaagatgaaaaactagaggacatgcatgcataaatttgcttatcttgcctggctgggttggctgacaaatggaaagagaccaaatctgagtccctattctagttgtttcagaggattcccaaggatgagtgatagtgagacagcagagaaactccttgtttcctttgctttctggtgaaaaaacagccggcaagaaataagttttctctgcaatggaagcacgggggaaaaatgcaaaacacaaaattcatatgtacaaaagaaaacaaaaggtctaagttctctccagactttgtgatataaatttttgaggaattagtttagtaagttttagaacctcagctatagaagaaggaacaccagtgggtatgttaggctaagcagttatgtggcctgcttaccgactcctacaaagctgctgaacttcaatctgcacggctcaatacagaggccagggtttgactgtgtgtatacaccggaagagaagctgcttgacagatgcctttcagaaatgtgcccactgactgccctttgctgtgtttttataccacccttccctagctttgtagcaacatatgtctgtttcctttaagtggagtttagaaccagatgttggaatttctgtttcctgagaagggagctgggtgcctgcattcatttctgtagttttcctttgacggattttgagcctcactgactagttgtcactggaaggaaaacttactttagtgatagatgttcccaaagctctctcagtagacttttggactattgttcatgcccccatgagatgctcttttcctgcacatgaagaatcatgtttaaaacctgtctgcctgcaagacttaccatacatgtcaccatcatgaagcctcctctgctgcctgacaccccactccttgcacagtttggaggacagcttttccttgtctagaatgccagagaaccatgtttttaccacctcaagacgtatggctttcatcctgctgtactactgcgtgcttgtcttcctttgtgtggaggctgaaggcatctttagggcaacgcttgtcttctattttattgcatccctaccattgttgacacacataggcatttaataaataaatatgttggataaatgaatacattgtataccatatgcaaattcagtactggattattgcatgaattgatgatttggataatgtaaatattgctgtatcttccaaaaaagaaatagtaattcactatgattgatttttttttttttcctctctgcgttttcccacgttccttgcctttctctcagaaatagaattgtcacatgacttttgagtctggtctcttgggaaaggaatatggtttgtctcaacagccttctggccaggaatggtagctcacacctgtaatcctagcactctgtgaggctgaggcaagtagatcacttgatgtcaggagtttgagaccagccaggccaacatggagaaactttgtctctactgaaaatacaaaaattagctgcatctggtagggcacacctgtaatcccagctactcaggaggctgaggcaggagaattgcttgaacctgggaggcagaggttgcagtgagctgagatcgcgccgctgcactccagcctgggcgacagagcgagactctgtctcaaaaaaaaaaaaaaaaaaaaaaaaaagagggccttctgtcccctagtgcttgctaaggttaagtattctgagtgtctctcaaagtatgagctgtgagatgcctgtcttatctgggatgcttattaaaaatgcacgtttctgggttccagcccagaaatatagcatcagctgtcttttgggcatagagtgtggaaatttgtgttttcaacaggtatcccaagtgattctcatacacactggaatttcatagtcactttatcttttatattttaattttttttttttttttttgagatggagtctcactctgtcacccaggctagagtgcaatggtgcaatctcggctgactgcaagctccacctcccaggttcacaccattctcctgcctcagcctcccaagtagctgggactacaggcacccaccaccatgtcaggctaatttttttgtatttttagtagagacggggtttcgccctgttacccagaatggtctcgatctcctgacctcatgatccgcctgcctcggcctcccaaagtgctgggattacaggtgtgagccaacgcgcccagcccatagtcactttattttatgcttataataatctttggagatgccttcagctcatttcatcatctatacctttttcccagtctcactaatctcctttgcttttctgccttacttgattctctgctgtctttaggagtctgttttaaaactgtgccagttaacttttaaaaattgtgtttatgtgtatgaatggtgtagatgccacatatatggcattggtataaatttttaccaaaatgagtagttacagttttgattaaaactaacattgctgctcaggaggcagtggatcctccagatggccttcagcttttatttctctacaaaatggcaaagtacgcttaggctctcaagtatgggagcaacaaaatctctctgctcagtcatgagcatatggttagatgtgcgaagtgctctgttctttctgctacagtcagggatatttaagtctgttatgagtgatccacaatttactgagcagcagtacacttttacgatgaaagtcttggaaaacagtgaacatatttcatctcatattcatttcagtgattatgctgtgatattcactgatattgactttcagtgaagaaaagcattcattattaaaatagtgtctttattacacaactgtactatgattttgaaatggtgacagggaataaaggaagaaaactccttaagccctttctgggtttagacaggcttgtggttagttgaattatgtcaataaatacagctgagtgattcctgattaaaagttgtctatgtgttaagtttaataccttagggaattaggactataagtactttgggggtgctgtgctgattacttttcttatatatttttaccagaaataaatgttgacctgttagatatgacgtagggtttctgttttcaaaaaggcactgcagcctatttgattgtaactcattgctcctggtttcccaattatcttttctttctttaaaaaaaatctttactgaggtataatatttattccctaaatagaaaaattggacattaatattaaaagctggcaaaattatgttttaaatattcacaaatgataggctggactatctaatataaaagtatcatccgtgttgtaaaataattctaattccattcagatgaatgactaccatttctagatgaattaagatattcagcagttgggccaggcgtggtggctcaagcctgtaatcccagcactttgggagcccaaggcaggcggatcatgaggtcaggagttcaagaccagcctgaccaacatggtgaaaccccatcactactaaaaatacaaaaattagctggtggtgtgtgcctgtaatcccagctactcagggggctgaggcaggagaatcgtttcaacccaggaggcggaggttgcagtgagccaagattgtgccactgccctccagcctgggcgacagagcgagactccatctcaaaaaaataaaaataaataaataaagatattcagcaattgaactcttgagaggtggtagaatcacagtgttgctttaaacatccaaagagctgtttgctctgcagagtgctgggaaaccaggcccaaatgaatgtgcagtgagagcacacgtgcacacacacacgaacacaaacgtaagcacagacagagcacacagattcagcattagtttgatcacacacctaagggttacatatattttttgaagttatttaagaacaatttatttaagaaagacagactaaagtaaaatgcatagaattcttgctttgacagaatatcattttttaaatctgataaaagcacaagagagtgcccatactcctctgcgccaaactcagaggaattaagcggaggaaagaattcctagaaaaaaaagaattcctagaaaactaaatcagaagcttaagctgtgatgtccattcataggattgaatcctctgccagcccagccactccctgtgcttatctgtctgcagattctaacatagaatgaccagctctccagggaaatgttggtagacctgtcatttgtaaagaacttccgatttggggatggggaaaaggagtgtttgaaaaccacctttcaaaatgtgggcaaatgttatttccaagaagttctagcataaaataacatctgtaatttccccaaagacgttctcagtttctgtgtcacatgattatgactcattgcagcagtaaaccacactgtaagccctgattttctaattaactttgttactttgtatttagttaggagttgtatatcctctttaaaaccattagtacagagatagaatccaattaagacctgtacttaacttcacttgggtgaaacaagagcttgccagtggattagttgtagatatctactaagtcagtagagtcttgcttttttcaattactttagattgccttgttttaatttatgttaatctgtcctttaactccagaatcaaatatgcttgcagattacactcagtctcgccacactttctgatcagtccctacttaagacaaaaatatatttctagtggaagtaaagtaggcttactttggtgcaggaaacctagtctttgtgatgacttacatttttctaacattaccaagtgtgtaggatttaaattaaatggctcttttgttgaacagtctacttgttaatagcctgacaggcaagtctcccagtcccagatgaaatctctctgctgtttttttacttcattggttaaaataaaagagaagtcactgcctcatgatttcttatataacaggtaataccgctccttgtttgctcaatcaaaaaaatttgaaagttaaggaagaaaactaaatccatatattttttattcattgtgggcttataatcactattttggctccatatctaattataatcttaaatttgatcctgcatcttatattaggttatcatttttttttttaaaaaaagaggactttcttgccaatcctaagaaagcctagttcttaatcttgcactacttaagtttagcatccaaaaggttgtgtaaaaatacatgtaccccagattcattttaaaacgagagatctggactggtcacctgccgatagatttagaaacttgtccttgtcatcaggtttatgctgtccccattgtatcatcaacgtttgtgcccaattttgttcctttgttgttgttttttttttttttttgatgtgtttccaaattgatacatcatagttgcacatatttgggggatacatgtgatattttccaattttgttcttgggctaatgtttttcagaatcacccactatactgcataacccacggtaaccattccataaaagaaaattttcttgccagattctgtgtctgctgagctatagaaccagatagcaggaattcatagtcaggaaaccatctgaacagctttaggtgcaaacgcatgggcctggccagtgtacccttctgacacaagtaaagagggagctgtccattaaacttgagaaatggatttaatgccttaatctttatccttgtagaatttggtcagcgatgagaggtttgttactcaaaatcagaccatcagattcaaagcatcttttcagtaatacaccccttggagggctaatttattacagtttctgagactccttaccagtttgtgattgttgactggatttttagaaagtcacgttcatggctcatttcttcattggctgaatagatctggggtcaagatcgtgctgtcagagctctgcactttcttgtctttctgcgatatgtagggtcagaaggacaagaaaggacatctgaatttctcaaccactgccctgactttcctttcagggttgactatcaattcctcacatatccttctaactattttgcctctaattcttgtatttgttcatggtattgagtaataagatgagagtgacatacaaggggaactcagtgtctaatagaaaggtagaatacaggttagaggacatgatttggacagcattactccggggaagcataaaaatgctatcggttattctaatgggcttctcagcctcaggcactgtaggcttgctggagctctcaggatttcttttaaaaagaaaaagaaaagttggctcttttctttagtgctcatgaaaatttttattagacaaggaatgagtatgagaaattaatttttgatatttttttcatgatgaactttttatgtcagaaatatagaactctgcacttagaataactctgaacagtggctttaggtgttcaattagcaataattaaatgtaagtttaatcttataggcataatctgaaatatccatgcaattcacctgtttgcaggctaaatagtgattagccagtaataacacgtatttccctgggatattattgggagtccccaaagggatgtcccaggggtccttaaatgactttctcagtgctggttaccatgtggtggtctcactagctccctgcccaaaagactgcttgaagaagcctcacctgtatcaccagccagtatgaggacaccagtgcccacaaggggagtgctgcttccagaaggtcacagggcactacctatgtggggccagagtggtacctgcttccatgcagaagtagcgggaggagccttctaccactctttgtcatccaggcccttaagcaactgtacttcattcattcattcaataaataaagcaagcatctcgggccgggcgcagtggttcatgcctgtaatcccagcactttgggaggccgaggtgggtggatcatgaggtcaggaaatcgagaccatcctggctaacatggtgaaaccccatctctgctaaaaatacaaaaaaattagccgggcgtggtgtcaggcgcctgtagttccagctactcgggaggctgagtcaggagaatggcgtgaacccaggaggcagagcttgcaatgagccgagatagcaccactgcaccccagcctgggccacagagtgagactccatctcaaaaaagataaaaataaaataaaataaataaagcatctcatctactgtggtgctgagtacacctgattaacaaaacagggtccttgccctcaagaagcttgcagtccaactcgagaggcagaccttagacaagtcagtacacaggtgtcagtgaaattacaaattgtgagaagcattctgaaggaaaaatgatgtgctataaaaaaagacaataatgaaaaaacatggggtcttcatctaattcaagagcaggggaagcccctctgagggagacatttgagtgaagtcgtagataggcatgtgtagaaataatggattttgtaaaagctgaccagtatggccagaacaggcaaatgaggaggtgggattgggaataaggatggggagggggcaggggccagatcacaaaggaccttgtaaagagccattagccataatgacttgcgaaaactgaatcctagtgtttcaactcgattgggtccctttgtagttaaagtataaatcttgtgcctctctagcctttttcctctccaagagggcaaataaatgctttccttcagacgcgtttcattagactcctttgctgcctgaatttgattttcgtttgactgaggtgagtaggaaccacagatagacaagcaaatcatcctggaggacttgagaaataaaagctgagatgatgtcccagtgttctgggttcatttatgtgcaaaggacattgaaaagcgatttgtaatttaatgtttgggggccaggaggactgcagagataccttccagtaattctgaatccaattattttatcaaaaggaaattaggattcctagaaaaggcaaaacaaacaaacaaacaaacaaaaaacaccaacttaggcattaatcacgggcatcttctttatattaattggtaaccaaagggccttcacttcatgtacattcccaaaacagatgaaatatatttccatttcataatattgccttattctcacacaaattatggtgtgggctaaggtagcactacatacaaagtagaactattatcattataatagagtacagaatacgtaaaatattcatgttcattgggctaaagcaaacctgccatttcaagtccattaattgcagtcgaatttagtgaatattttttcagggactaacactctaattatctaaattaaagtgagcatttaagtggtttcatgttcagaatgcaggtgcagtaaagtaagttcttgtttagctaacctttgtccgggtgaaccggatagagggctggggcagtgttttcccacagtggtgctttctggagtgggagtgtttatgcattggtaaagccatctgatagttctggtcattcctttatttttttttaaccttccctttaattgggtttattctttatgtaatactttcttttaagggaaagagctttccaatcttttgaggagtagaggtaacaaaaacatagaatgacatagaaattattatacagcactgtatagcctccattaaataacatcccccacaattcgttaaattgctggtttcagattggttggttatggttgaattttagtaaaatcggtttttctgtgtctcatggcgtagaaattttcatacagcactgtagtcgccattaaataccatcccccacaattctttaaatcactgttttcagattggttggttatggatgaatgttagtaaaatcagtttttatgtgtctcttttgaggagctgtatgactctccatattgtatattactttttgttattagcttttaaaaatatccccatcttatttcttagacttttaggatctgaaactgctgtagagctatgtgatgtagggaaggaacacaggttttaaaatcagatggctgcaggttcaaatcccagctctgtcagtgaagatatgtgacttggggaagttagttcatctctctaggccttcaatttcttccttaccctagagtgacccacttaactcatggaatggttatgagaattactggattacatgaaggggttagcaggatgcctggcctccaggaggcactcagtaaggggtagttcttccctctttcccttttgaaatcaattcacctggcctcctatcaaacatcaagcttcttttacaaaataccgtatcagtcagagaatataaagccaccctgcagtttccccaaatacagtgagacccagattcctggcagagaatggaggtagaaattgcacgtagggaagaatgactgaaccactgttgtcctacttatagtccacaagattcactgtgtttgcctctgccacctccacactagcagtgggaaaaccttctcctattacttctctggcacaaagagagctggaaagtagtgtaataacaacagaataaatacagacactcggaagggtgtaggcaactagataaatcattctaaccaaatagttcacttatagtgagcctggaggtaagtctagggttacctcctggtttagttttctgcgtgcttccagtaactgcaatgaccctctcttactgcctgggaggaccatccagcctcaaagtctagacctaagaggagagtccgagagagaaatgcaaatccccttgtcctcctcaggctcaccctttgctctgcagttccttagtcggtgatctacctctttgagttctagtttctttgccaaacacttacctctttctttgatacttgataacaagaatctccaccagtttcagggggagtctacactacctcaagtaaactcatacttctttcccatggaagagcagccatgcttataggcctcaagaagacaatccagacaggagacaatgcaataagccttctatttctacagaggactagccaaccaccatgaacttgacccaccgaattaggtgatgttctaaattccctgtgtagaatgtacccgtgatgcctggggggcgggctggacgctaagctatgagagatgacacattagtgcatcctccttcatagccccatggctgcccctgccaggtaggttctaggtttaacaaactcgtttgtacagacttcttcttataatggtgtcatttaataaactgataaaacatgagttcagaaagtgagttgtgtctgcaaaaaataaccaggatgctttagaaaatcttgataaaggcaaattattaaaaactgttgctaagttagatattggaaggatactgtgagaaaatagagacattttttaaatctaggattttttaaatgttcttggccctacatcacgagagtggatagtaaatttaaaagattaaatttaagctttatttgtatcacagttttatttttccctgcttaaactgcctgtatcttttacccaagcaaataccactcccacttcatcagataagagtatttcttctgtacatattaacaggaccagctacataatttgcagggcccagtgcaagatgaaaatacaaattcccttcttcaaaaattaagaatttcaatacggtgacagcagagcattaaagcccagcaccctctgagcctgggccccatgtgtctgcatgggctgcaggacatgaagctggcaccagcaacagacaaaagggctgggaaggagaggtagtttcacatgtcacccagctctctgacaatttctggtgccaaagagtttccccttgtaagagacacctgttcattgttgaattactgcttggaagggctttataccgagcctaaatccattctcctttaatttctgctctctgatgtagaacatacctaatcccaaagccacacttaatctcttcttcttaatgtacctttttgggtggcagtatagtttctaaaaccacctccatcttctctctcttgatactctctgttctttctgtatccttctgatgggcagtgctcacattcttaggtataaactccaaattcctgatgtggtatgggagtttgaaagcttggggactcctcatgaaaatactgtattggaattttggatacactgttttgttctgaacttaaagaaaatcacttaccctgtttaaaatattttaaatgttttggctgggcgcgggggctcacgcctgtaatcccagcactttgggaggccgaggcaggtgcatcacgaggtcaagagatcgagaccatcctagcccacatggtgaaaccccgtctctactaaaaatacaaaaattagctgggtgtggtgtcgtgtgcctgtagtcccagctactcagcaggctgaggcaggagaatcgcttgaacccgggaggcagaggttgcagtgagacaagattgcaccactgcactccagcctgggtgacagagcgagactctgtctcaaaaacaaaaaacaaaacaaaagaaaaatatatatataatatatatattttaaatgttttaatgatgaaatcaaatatatagaaaagtgtaaaatactgtagacttcatgtagtcatcattgagatttcattgttgcttaatacctctcccatcatctttgcaactcctcttaaaatatttttccatctggcttctacttacccaatttactgttattctgtatttatatagttgatttttgtgacctgaaggatttaactttgttggggcccatccagagtctctgtagctgtactggagacttctctccagggagccctaaaactaaaaccaactctttctggcataatttttaagtttattaaaattctatgaaatgaacctcgaaagcattatgctaagtgtaagaagccagacacaaaaggtcacgtattatatgattccatttacatgaaatatccacaatggttaaatccatagagatagaaagtagatttgtggttgctgggagctgggaggaggtgggaatgggggagtgactgcttactgggtacacagttttccttttaggtgatgaaaatcttttagaactgactagaggtagtggttgcacaacattttgaatatgctaaatgccactaaattgttcacttaaaagagttgattttatgctatatgagtttcacctccacacacacacaaaaaacaaattctatgaaataatatttaaatgtttgcattgtagcattgtatatacatattaaaatcagtagtattgattttttttctttttcactggtaactacatcatgagtattattttctgtatactcagtttgaagtactactacttctttgaagccaggaagatggtaattgatggtggaacaatccttatagataaattttgtattaagaaccaattaagtttatattatatttgagatggtggttttatttactcataacaatggaaaattctgtaactcagtagtagtgtcttgggtaccgatatgtacttcctttacattacttaaactgttcactggttggtataagactgtattccagaatgacatatgaaagtggttggagcaaacccagaaagttttcctttaaggagactccattgaaatgtctcttggacccaggtataaaaattgctccatttgcccttagcctattaacatccctttcaaaatggaatatatcattcctagtatgtgacagtattttatgaaacttaagaagacaaagagaatcttttcttccaattctgtatgtttttatatgaatgcagtcaatgcctaccagaaaaccatacggtgtaaaacttgactcttaacattttgaagaattggaatgattctccaggagaaactgcactttcaattagagtggtttaagctacaagtaacagaaaactctgttcaaaatggtttaaacaaggactttagctcacatactggatatccaaaggaaaggaaggtttcagggttgtttagcatctcagtggtatcagccaggacctggggtctttccttcccttagcccggctctccacagtgttgattttatcctgaggctcattcccttcatagtcttagaaggctgccagtgaaacagtgctgcatgtttccttgaactcctggcctcaagcgatcctcccgcttcgacctcccaaagtgctgggattacaggcacgagccaccacacctggccaactgcatgtttcctaattcacatttggcttttagtgattcttaataaggagcaagaaagtttctctcttggaagtccccaacaatcttctcctcccctgtgattggtccatactggcttatgcccatctctgaacaggcacattggggtggaaggctgagtctccatgagcccattgtggggcttcagctgtaatgcatgcacactgccagctctatagtactcccattaaatagtcttagaactttttaaatgtcttacataaatcgctcattctgggtgcagatgattcttcagaaaacttattacgttgcttttatattacatcactgcagtgtagcatatctttcaaatgtactattgagatgtgctatttgcagcccattttcaaaagctaggaatattaaagcagagaagaaaccaaagtttgctttcattggtgcatgcatgtcattggtgagtgtctcctacttaacaggaaagcaaaatctagattgtttatgcattttattttggattatgtatgctatatgtgtttatttttaatagacaaatggtcttttatagttggtgtacccttggtgcttcattgctgattatgttgttttgttccattttcttaactatatttggtatgcagaaattcaaccttaattatatattacaggtttttctttgactttaaaccatgactccttttgtttgaatatgttaaaaagataaatctcaaattgtgaaaaactgagttttaaaattacttcagcccatattttctgtctcaagtcttaatttaacacagttcttaaggaatgaacgtaggcactcataattgagtgcctctttgcctatggaattcttttcctctgttggcataccaaaattgacatttgttgagcttcaagttttaccacaaagcctctgaaccacattagtcaataattcatcccacatccttctttctgctctgaccccagttccagacagtttcttcaggtttttgctatagtgcagaggttacaacctggtggcctacagctctgatcttgcctgcaaatggtttttttgttgttgttgttggggggcaggttgggggagctgctgaacaaacaaaatttggggattatctgacaacaattgacaagtgggagagttgacataagaatccagttctggcttgtcttggaaaaatccaaagatctgaaaacaatttttggcataaaatcctgaatggcaaaaattctgtcccctcttctccaactgagttatgttatctcccaggcccctgaagacttttgaacttcagactcatttagagtgcattagtgctaactggtgccatcctgttttcttcctacaaacagagcacgtcatctccgcagacctagataaaagcagtttaagaatatttctgtaagcaaaaagacaaatatgattgttcaagccgatcaggctgtagatgtaaggctctacagctttttaaagattcctgtcttcctgataactcattggaatcaccagtatccttagacaagaccttggaacagcagaagaattcagtgtacacctaattgtccagttttggtaaaggtttaatacaagatcattaggatataaagtcctaacccgtttcctctaagggaggggaagtcatatatccagaaggattgactccacgccaactgtgagggtcattcctgctgatattcagtctctaatatggattccctggtcatttgttaagactttattgatagtccttattaatactaaactcagtatgtgctcccctcctaaaatgtacaattgcagcattgacctacatactgtattcataggactggataataaaacagcagtaacatcacagggtgttcttgctcaaagatgattacagtgtcatcctaatgtccccttattgctcttgaatattcccattaacccaactctaggacctcttccacccccatcagataaattcattttacagctctaactcatgtgcctttactcttctctttgggcagactccttaggtcaccctccattcccttttaagtaccagggtgctgcccagggctgggtattccagtgttaatgacaatcacaggcatacaacttaatgttctcttcttggcttagtttttccagtctgatttagatgtttatcatgaccagtcctatcactggggaagggtgtaagttgaaagaaagcacatgtgtgctttcaatagtgacttggttggccattacaacatttttgtgatgaataggattttgcagactagcaagctttgaaaagtgtttgtatctgccaaacattcccgtgtatcgggtgtttgttactttgcccaactgggtaatctggattgtccctaaaattgaagctatttacaccattttaccgtgacatcccattgaagtccaggttcctagtgtgtctttgccactttgggctctgtttgagcactgtggctagtaatgcctggtgaaatgtaattttggggaaatgtgggtcattcagtgactttgctgagacagagttcacctatcacaggactaagctccatgtacgcaggaatttgttgaccaatgaatcctagagcactggaataatgactagtgcctagtagacatccgataaatattattgagtgaatgaattgttgacaacttaaaacataccactgtacatattataaagatatgtgggttctttttcctgttgggttttaatcaaattgctggcgtttattagcagcaaaaattggggttctgcatttgcactgttcagatttatagattaagcaggatgggcattccagaggtttctgtcttctagagttatgtctcagaaaccagaagctggatgtgcaatcgttttttactacattacccaggcaagaattaattcatcatttttatttcaccatttctcgttataagcctaatgccaatatcttgttcagaacagtgccaaatttcaccttctgctaaacgaagaattggatatctgtttgtacagcacactgtagacctatggcagattgactctttggaaatagaaaaaatatatatttgactgacctccagccagccagaaataaatcctctgcataatcttgccaaaatgtcatttggttgtgaacagcgcccttcatttgtcttaggagagcctgcgtatcaggtaccaggccactgcaggcttttctgctcttcttttttctcccaggcagctgcatctttgataatgtggattcgtgaaaaaatctcattgtcctccttacctgtgtcatgaacttctttctcaccttattgaattatctgttgagtcaggaagtttttttttttacagtttagtttctaataaccatttgaagatgatgatgatgattattattggtcgttttagcccttgtgttatagctcacattaagttctcttctgatgccaactggaaattttaatctaccattactaagtttaaaaatatgttcacttttgcatatgggtagacaactttaatcatgatttttttttactgcttatcactgttggcttagctatgcttctactgggtgattgatgtgttttctttttttagttcagaatttcctgcaatttttaaaatttcctgtctataatgtgtataacataaataacacttaattggactaagtgatatttcatttttacttttctaggaaaaacatctcttattctggatatgtaaatagggatgaagacttacaaacctaatgttctttttaaatttcttgattattctgcatttagagttgaagtcatcagcttggccctgctaactctatcacccactgctgtctggctgtcctcacctgggacccctcaggtgccaaatttaccagctctcttccagcattggttgactatttaaaatcttgatttcatttatcttgttcttgcatacaaatgaaatgaaattcctgaaccaggtacaactggttctttggagaaaatggactccatctgagaatagctatttagtgaagacaattttcatgatagttcatcttaaggatctactttgtgatgttcttactaagtgttggacttttagaagccaccatgtgtagtcccccattcaccaaatgaagtttattattcaccccttcattcacaaaatgaagtttattattcttcattttggggaatgactagcattattgcttaaaggatgccccaggtgcgtacagaccactgggaatgagcttaaagccctgaagcagctgatgaatgtggaacattgatcacccacctcatccctaccctggcctaatctttcatctgtaccaaccaatggctatctatatggagaaagaaaaataacagcaagagatgtaagctgggaatgccactcacccttgttctgtgggggtgagcactctggtctggggcttgaggatgccttcaacacctctcttggttgaagctctcagtcactgattgctctcgatctatcattgttgctgcccttcccataaagcatgactctgagcaggcaggtaagctgccagtcttctcagtcctctttgttccatatgctttctagaggcatgtttctgaatatactcaaatacagtcattttttaaaggtggtttaactgtggtaatgatctcaggaattttatatgtaaatttctaaactgaacatttaatgtaaactaaatcagctctatcaccacctttgattccagaaacacttttttttttctcatattaacaagataaagccttcacctatggaagaaggattttttttttcttaaagcaggataaaagacatggaagcatccacaacaaaataatcctcaaaacagctttgcttttctacagctttaactgggaccagctgtcaaattcttgagtgttgaggtgtttgaaaaaccatggctgaaaggcactaagatcagaaagatgatgggatttcatgttgggaagcattagccccagttgtctaaaatggtcttgctagaaaacatggagagctttttgatgtgtgtttcattctctctcggttcactatttgggtccccaaagggatcttcatatatgcctgcgacttctttgcaggaaaaaaatcagcttttacatgagatagacgtcacactggcccctgctgtctgatataggggaggggactccatgcataaggggcaccagcagtgcctctctagtcctaattcttattttaagtacctgccttaaaagcagtaacaatctattttaaggaggtaaatgctatctgagaggcagaaggcactgtggttgtgtgtacaatcaccagagagccaaactgcctgcgttcaaatcttgcctctgtccctcccaagctgtgtgagttgaacaagttgcttcatctctgtgtgcctccatttcctctgcaaatggagcaaatacgagttccaacctcatagaatagctgtaaggattaaaatttgatacataaattgcatagtaaatctcagtaaatatgttaccattaatcattaataatagttttatttattctgaactgctttattactctagtttgtaggatttctcaaagtcaaaatgaggaactgtcaactcagggacttgctcaacagtgaaattaaaatctcattaaaaggaccacagatagatggggttatttgggggttatttggaggtttcgctattccttgggtggcttagtacaggcctggtctttgaacttagcacagtatggtctttgttaaaacattaggattttgccagctggggtttcctctgccatgcccttcctaggatctgattagaatttcaaggatcatcttaatgatctgtcttattaaatgattggacagccatgaacagaatacatcagtgagaaagagaagtattatatatatatatttttgtcccagcattagtatatcctattttttcatgaatactctacagccttccatagttaacttttctaagtatactctgccaccgtagaggtttctacgaagaggggtgatgctatcacagagttttaaaaagcttccgagtatatgcatcctcgcttttctcacagttggctaatctaaatctgtaaatcctcttcttaacactctaaaagtataggattatgataagccagagaaaaggggaaggggaagggagggtggcagttttgtagggaaactacagtgggtctggcactgcattgtctttgctcgtgcccagtcttttgaactatgaattgattgtagttagaaatcacagcttttcatttgatttcttccaatgggagggaaaagccagtcctgcccacggttaatgagatcttgctgcctcaaataacattggaataagcagtgctaacttgttctcttggagactacacatacagcccacagtcttgttggcccttttcattgctgtcaaacattcttctgatttttactccttagtgcattattgatgatcatccctaagtcagcactcttttctggctcgtcttctgtcttttgattgcttgtgactcgtcttcgtactcagcctcattactgcacactgcatgaggccttctccacatcctcctacaaatggctgccttccctaaggtaaccaacagctttatttacatgggtaggaagctacctacacctcataatgacctcacggtgttcctttcttgtctgttttcttaccagaagtgtttggtttgtctccttctgttttttatttcccaaatcaatgtgacatcgatttcactcatttttacctgttacttatcttaaaagtctaaatccatttctggtgctcaggtatctaaggctgaaagacagcaaattggtatcctctctctttatctaagagggaaggaatggaaatctgaaagtcaaacactttttttatgtttcatatgcacgtgaggaacttgtggtatgtgacccttttataaatataaaacatttctgagagtttggtaatctacaagtttagaaattgtgatatcattgcaaggaccaaagcaaaaattgtagtagctgttccctggattgctttggatcaaaatttttcagcatgatttaattcccctctagtccttagagcccagtacatcctcactgcaggctgtcttatttctcctgtcgttctttcaaataatttctgataacagtaagcaaaaaaactttttgataatcatcacaattgtagttggcattaagggcagtcagtgttcctgaagtgtatgtttaagattgtctctgcttcccccaccccaactaagattggaatttctaataaatcactgtgttgtacaagttggcagtgctggccatgtacatataacaggtgaattccaacctagagaaatattagtggagacttagaaaaactgtgactgtggacactatgatagaagtatttggcatattcggaatttcctttcttcccaaaataccgtgttttgtttaatgaataagatagacatgcagcccattacaacagccagtcttgggctgctaagagttttaagtataaggttgttgttaaagctattgaacttttaggatatttatttccttaaaatgccttcttacggcttgtggtaggtgttgaataaatgttttgatttcctaatgcatgcaaattaatatttattattatttactattagtaatagtaatgcatatgttgagtctttgagactgtgtcttagtatataaatggccacttttcccctaaaataatgtcatgtgtccaccaaattcagtaaggctagtggtttcattaagatgcactgccaggtagtgaagctgtagccagtgtactgtggaaataggtaatgaaggaagattggaacttccttctgtagacattctcaaatgtaggatgaacaacttcctcttgatctcagatgatgtgcagatatcctgcttggtgaagaaaggatggagttgggaaccctggcatgacccttgtaacatcaggacatattacaagctgcttttccactgctaattttattcatgcgatgttgtgtgaaacaaacaagtgcacaaacaacaaatcagttcagaagttcttcccctgaagaaaggttttttccagtgttgtttgtttatcttctttgcaataataactcttccttcttcattaccctggtggtaagagaacaatatcagggaagaaaaatgaattccctgataaagtatttcttatctgttcaattagcgcaactaatatagtgagatacagtgatttctcaattaatgaatcatctagagaaaaaggtctacatatggttagttgcattcaaacccataccccatgcaggcagttgtcttagaatatatgagacagagctgcctgcatgagagtagtaaagccaggtactgtaatgtccactttaatttgtctcaatcctggcaatgtacttcattagttttttttacattctatgtgagaacatcattttatgtggatggtgttcatgaagactggctgtatgtgcataaagcttttcatttgaaaatgtattttaaaagttaatttgacctattataatgttatttgacattctaaataatataatacaaatatttattattttaagtgtatttttaaaagttaatttgacttattaatatgttcagtcccaatcagcaaatcacacaactgttaaaaatattttatgtttacaaagccaagccaaaattttatgttttcctccccaaactttgatataaacactaacattttttagcatgtataaacatcattattaaccagtgtcctattaaaactccttttctatgatagaatgtctgtgcttttaggtggataaggcctagatgattggcctctaccagcatcctcatctctgtccctgatgcccagcttcagcctcgctcctgcatgctggaccgcttcagtgcagctctcagacttgctctgtgtctcacatgctctttggctacgtggaatgctcccactcacccagcaagctcccattcctcatttaagatgtaaattgagtgtcacctccctctcgaatcctacccagaactctccaggtggtttgcctctgtgctgatgttgcaccttgttcctgcccctccaacagcactcatgagaatatgttgtaatcatttgtgtatgaatctgcctgtatgagatgcaaggcaagatttgcattacttgtgtttatatctcctcagcatctaataggaacactagtttatggcatatacttgtaagaattcgtttaataactgaataatcatagtccacgtattagaacacacatctgcttaaaaagtaagtcatggatcttaataggcaacagcttgagtttcctcctatgcaaccactcaccatgccatcccgctcacctccccaatcttgacccccagcacagaggggccacattctctgtggtttcctcacaagctttctcgtgataaaatgtataatctgaaggatcttgaataagtactactgcctacctcccttggagagttggaaacagcagaaattaggatctagaaggctttgtgtattcaagttgggatgggagcaggcacagaaaggtaggatgacctagcttaaatccatatttcagtttagggagaaagacctggggcatgctgtcaggataggagtgatccattacagagagtgctgcattcccagcgtccagtgtcagagagacacattgcagaagggacgggtaaggatgtctcaaattcagtgcactggatcagaaggcacactagcatgcctgaacccttaatagtcaaattttaggaaaagagagaggctccatccctcctttccccaataaaggagaataatttcatcaccaccagtttctatttcctataatttccttccttccttccttccttccttccttccttcctttcatttctttttttttttttttttggatggagtttcactcttgttgcgcaggctggagtgcaacggcgcaatctgggttcaagcgattctcctgcctcagcctcccaagtagctggcattacaggcatgtgacaccacgcccagctaattttgtatttttagtagagacagggtttcaccatcttggtcaagctggtctcgagcttctgacctcaggtgatccacccgcctcagccccccaaagtgctgggattacagtcacgaaccaccgcacctggcctatttcctacaatttctatgctatgaagtacattcttctaaccataatgagagtttaaggctcaagtttaattgcagatgcctagaagagttaacatattatcctcaacaaaaatatgctgctaggttattttcattcgtccattccataattatctatgtgcacctcctaagagctagacactgcgctcaatattgggtgtacagcagtgagccaaatggattgtgtctctgtcctcatgctaccttggcctttactagtttgagaagggaaagaatttttaaagcatctaataaggtcaggaagattacttctgtgagatggggtgagtaacataaagtgaaagctggagatctgaagagaagcttttataacttcaccctgatcagctctacctatcttcatctttgtggggggaaaatagcagcttctgaaaaagtgctccctattcttggctaccaggtactcccaggtctttcatttgttaattcatcagtgcctattagatgccagctcagtgttgggtagtgactgagaatctagaggtgacagatgggtctactgtgaaggagcctcagtctagctcccttgtaagtagagtgaccacatcaatttatcatccaaactaggccatttctgagagtgtagaataaaaaggcacctcttgcagagtgatataaacatacctcctgcagctgtgcctgttacatcaccttcttagggaataacctatcaaaagtaagtgctgcctcttgaaggagattctgatgcttcgtcagccaacttgtgtctcctgtttttggaggggtcagtgctataactgtagcctccaagatgggtggaaaatattgacagacattttatgtaggttacatgcctttctggagaaaaaaaattcagcacttaattttttttattagaatgcactttttaaaagctcattggtgtcagaggggtttaatgcaaactaaaaggatgactaatcaagaaaataaataaatagttgtagacttataccatacaacaaatattgggacgcctataacaagaatgttcaagccgacttctctgtgtcctgtggcaggactggtcagactttctatacagatttgatgtttactaacctctcatttcacaatgactccacgaactgtatcttgcaggctgcctagtgggtctcagctctactagccagtatgtcaagtttctggcaaggacgtcggcactgaatatttctcccaccaccaccctaactagaaacagttagctgcccatgccaccctttgtgttatctgcaagatctctctaggttgtctttcaaggagaggtgtgacttaccttggatcagagaagaaggatgatggcagtggctgtgggaggggtagaggaaggagaaggttattgggatgatctttcagatttaatcatgtgttaaaatgagacctttgcacagtgaaataagatttgaagctggaggtacaaagtaaaagtccgccaaacccatcccagcttgttttcttgcagcaattaataataatttgtttaaaattgtaaaatacaagacaaatgttaaattgaacacaacaccgggacaagagacttttttgtgaagcatttgatttttttgtattccataagttcttttcactttcctagaattcttctcttcttctaccactgattgtgaagtttctgcaaaaagttccctttaaacattttaccttgttagagaaactatataaaatactcagccagttttcttatacttgatccaaaccaatccatcaagaatgggagaagtaggaagagcaggataatattatttgcagaaaagtctaaagcagtgccacttacagtgtgatccctgcactggcttgagccacattgtcaaccagctacattattaagcacgttgtacagttcagctgtctttttttctgggtagcaagactttctcaatgaaggaagcaatggttgacttacattctggtgcatactccataccttacgtggacctgcaatgaatattttgacaactggctactttgagttttcactgatctaaggcacaaataaggtgattttctaaagtctcatattaaatattataaacaggattagatttcaagtctttcatttttttttttactctgtggcctaacgtagtgtgaagtcttagttcacatccttgaattgatttgatttcttattattcaagaagtgaattattcactcttactctgtacatttcactggctgttaaacctttactttaaaggttttggaaattactacacattaaaaaaaagaagaagaagaaatgaagataaaacctttaaaggttttggaaattactacagatttaaaaaaagaagaagaaatgaagataaaacctttactttaaaggctttggaaattactacacatttaaaaaaaaaaaaaaacaacaacaagaaatgaaggtaaagtagatgtccttccccagagcagtgccgcataacataaacaaaggcttagctctctcctcctccacatgactggccacatgtgtgagagagcctctgcttgggactgccaccgtgtgctgggctcacagtccttgcagtttccctgggctttgtgcttatgccagatggctctgcctcagtcggctgcattggcccataatttaggtagcattcctcatatccgtagatttactatctcattaattttaacttttccaaagcttttcccagtccagaagccactaggttaaatctcaagctgtgtgtgtcctgttaataggtgactatcaaagcacctctctataaaatggatcaaagtaaagtgagagtgacggtacgaaaaagttgatcctgggaagttatgtgttgccttttcttttcctttggcatatttcttctcactgattagaacttttctggaattcacatggttcatgtgacaagatcgtaaagagagcttgaagcttatttccataagtgtttgttttttaatcaagtgattatatgcattgaaggagacacaaattatttctgatcttatacatagactatattgcagaacatttggcccactgttttaatttgtagtactagctgcatgtgagccttcccctcaacagtggttgtgagattgtcattagagtcctagagtattttggcttatatgcatatcatcttgttaatatttccagaatgtgctcctggatgtaagactcttctcttggcatccagacatgtagcataagtaaataagaccttcttgctgtaggcagaaaagacctgggacgactttgctttgtgcctctagaaatcacagttgggtggattccctgtgtcatatcacttcttccctccatgatgtgatcagttccttctctgctttatttaattattttcaaactcatgacctacacatttaaaatccgtagaagaaagtcagggtttctgaactgtacaaaaagctctagcacactttccaagatgcagaatgatgctgctggagctatgcctgatgcctctatgtatgttttattcatctactggatgacctgcaagaatgcctgataggcactcttggaacgttttacctctcggattaagaaacacctgtgttttcctaataaaaacttctgtttctttttagaaagaggcttctacctaattcagcaaaaccatacttgtatttatgggaacgtttaagacctttattgtcagaaagtagccctaaaaagacttcaccaaatatgcgcatgaaaagatgctctattagagaaatgcaaagtaaacttattacaggataccacaacagagttattagaatggcttgaattaaagactgaccatactaagtgttagcaagtttgtaagttctaatgtatagaactctcatacactgccggtgggaatgtaaaaatggtacaatcactctggaaaacattttggcagtttttaaaaaattaaaaatacttctatcatgtgatccagccattccactgctaggtatctacccaagcaaaaagaaaatgtgtatctatacaaagatttgtacatgaatgttaataacagcttttttgtaacagcagaactcagaaatacccaagtattcatcaagaggtgaatatgtaaacaaaccggtatagcatacaatggaatactacttagcaataaaaaggaatgaattatcgatcatgttccatcatggaccatggtcatattttttattgctcaataaaaaataatcatgatcaataatttattcctttttattgctaagtaaaataattatgatatgtgagagaaactagataaaatgggtatgtactagatgattctgcttgtgtagcatttagaaaatgtaaactaatctatagtgacagaaaacacatcagtggtttccttgagaaggcagcggatcaggaagaggaagatgggaggaattacaaagggacacaggaaaactgatggacatattcattatcttgattgtggtgatggtttcatgagtgtgtacacatgttcatactcagacttgaaaaacatgcaatttgaggtatgttagttatacttcagtaaggctgttaagcaaacaaaaagcctcatccctaagctgcttacattagtataagaaaagatgttaggaagtatttaggaaagtaattgttaagatttcaaaggacgtggccccactgataatccagtaaatgccatgaaaccacttttgcaaaaattatgaggaaattatgacagtggaagagatcagacctgactccatcttgcttctaacctttaagctgtccttgcttattcctgggagtaggccattaaccttgggatggtatttagtttatagtttaactctgaaaattttgtttcagagttaaagccctctcccccgcacctcccaaaaaaccacctcttgcctgggaaacaatctgcctttgtaggattaacatattagctacaagattagaaattatggtttaggggccatgcagcctctgtctgccaagagtctgaaccaccccaaaatgctcctgggaataccatcactattgtaaaacctaagatcggtgcttgagatattttgcagaccctgcactcagtgcaccagctggcatcacccaaactagtaatctggctcagtgagttttgcgatcccacccaggaacagaagacagcaacctcacttcaacccccaatgattccatctccaaaccaaccagtcagcactccccacttcccaagccccttcctcagaattatccttaaaaactgcaaccccaaatgctgtaggagactgatttgagtagtaataaaactcccgtctcccacacagccaactctgtgaattaccttttctccattgcaattcccctggtcttgataaattggctctgtctaggcagtggccagggtgaacccactgggcagttacagccatacaccctctccccagaaatgtgcacacaaagttttgcccacaattcagagggttccaagactgaaaacctctggttaagacacctatagaatccttactcattttcaaagaaacaaagtacttttcaacagctgttgctgccactcaacaatcccctttgttttttttttttttttccgaagcaagtaaactaattcttaccttcaactcagatgaattctgggtattcctggtaaacatgactttatttcaagtttagccattttccatacagcattgttatttctactttcttcatcctcattctgaagagaaattaaactataagcttaccagtacatcacctctgtaagctaaatgaggatacagttttattgattacaccatttcattgctttcaaaatgagcaataatcacataatgattattggacacttcccataacataatgattattggacacttcccattaccacactgtcagctagttcataaaactgtaccttaaacacattaaaggaaattcaggatcaaaataccaattttatggtaatattttaaaggacagatccagtatcagccagttttgttacgccaaaccgaatcagacatttgcactaggaccaaataatactaataaactggaatttacctgaactgtaaggagaatggcaggtgtatttctatgttttctttattcctcatacatcccttctatatgtaaataatactaatactcaagactgtttgacattttagtcttaaagtctgcatatccatagtacctgtaacattcctagaattgtaaccatcccaatgggttcttcctgcccactgcacaaataaaggccacagcattgcagtaaaaaaaaatagtttgattgacatgaggctggccatgccacacaggagaaggagttattatgcagaccagtctctctgaaggcttgtaggctaggggtttttcaaagacagtttggaggaagggatgtggttgggtagaaatgggtgcttgctgctgattggttggggcagagataaaatcatagggggtcaaagttgtcctcttgaactcacttgcttctgagtggggccataggagcagaggttggcgggtccaggtggagccatgggtgtcagacatgcaaaaaacctgaaaatctcaaaaggccaacctacagtagtgatgttatctacaggcatggctggcaatcatttatttctgcaccttaccagaattcaggctcctcttctccccctagcctggtggtctctcattagttttacaaaggtggttgagcttttgagaaggcctgttatcatttaaactattaatataacctaactgtcttccaaagttagctggcctaagcccagaaaaaattaaggcagcttgaaagctaaaggcaagaggaggggttgactagatcagatctccctcttaataatttttggaaaggcagttttagaattttttctaactactgttttttctcactatccagaattctatttctaagtgaaatcccaggaaaactgcttgtagtatactcacttcttttgttatttgcacttttataaatttgatcatgagaaatatcttctaaggtgactatactgtgtccttccctataggcagagtcttagggtttccgaggaaaaatttggagagccatagatttgtatgcagatagttttttgaggagttcttttaagatcagtatctgtgagggaataaaggaagcagaatttggcagatagagtaattgtgtttgaactgcagcaaatgcctccttcagcaaagggaggaatgaagctgagatgacccttagcgttgtcctgccttgaggcgatggggcctttttcctatcatgaccagtcctttgaagagagggcatgaccttggctaagccggctttctgcggtcatggagaattcccaaagaagaactaaactgatggttaccagccaccaataatgccagcagatggcactgcaaactccgcctcccaggtttgcggcattctcctgcctaagcctcccaagtagctgggaccacaggaacccaccaccacgcccggctgattttttgtgttttagtagagacggggtttcaccgtgttagccaggatggtctcgatctcctgacctcatgatccgcccacctcagcctcccaaagtgctaggattacaggcgtgagccaccgtgcccggcctacagtccaccttttgcactacttggatccacctgagaatggttcttctggattggttgatctcttttcctggggggaaattgtaagagggaaggttagtaatgtgagttatagtccttacacctggtcttgaggcctctctgatactcctcatccccatcatctacattctattgtagatttcctctgctcgtctcagtgggttatgtggttggggtggcctagactctcatccttgaaaaaaactgaatgaaaatggtcagtctttgaaatcatgtttgcctaggatatgataccaaatactcaattgaggtgaaccaagagtaatttatttgcattttgtcttttccatgatgagtcataaaatgcagaacttttaataacaaaagctttaaagactcaggaaggacaaggtggccatcatggttctccatgagtccatgcttaattaacattagacatattaacttttgaataccagttgtttctccaaattaggtacatagcactgataactgatgggttaccataggtaatttgacttagaccatggagttcattcaaattgtatatctaaacaatttcaatatcagctgatttagcatgaaaatcaatttttgttctacttcagttagcagttttataacccagtcagtcttttcattaaaattccaggaattcttacccagtttgaatgatgtgattctaaagttattagaaacctgtattcaagagtgcttttagggtcctttccatccttttgtgaacctcctaaaagacactatactctagcattttgcatgcttgtgaagttttcagaaactgcatgagcattaagcacttaaccgtggaaatgactttaaatagttatagttaaaaacacagttgacaaatttagttatttctgtggtctgcaataacaacataataaccataattacgattgatagcatatactcagacatattagaattttagaaatcccatacaattttggaacatatattaatatcattcactaaaatataacctgaagaagattaaactttttttaaatttttgacaatgcttcctatgtaactaaacatgttaaataattgcttgcctttcttttagatgcttcaggggccctctgtagcatctcaaagttagaggtcagaaaagaccgttttgaagctcaaatttgattttggaaaggctatcaaatatattaaggtttaaaacacttggtattatgaaatagaattccaggttaccataagtcattcatttagccaaaatgatgactcaaaaaatttttaaaggcaaaaacttttactcactgatagggggaagacttagcttttcaaacagtctgtctctttgccttctttttttgtcagtagtttattcaaaagacaaacaaaaatcttttattatcttttaatattacatgaaaatttgtttaagagagaaagccaaatttcatccttgcattagtgtattattaatgtccaccccaatttttaataaaaccttatagacaaatctttccagtcttaatcagtttaaccataaggtgagattctcataaaccttttataaccctttacaaatttttgttaaagagcatattagtactttaagaaaatcctgtttgtgcttttatttcaatgttcagtttacggaaaatacacctttaaatttagtcaatatattcacacacagaatttttttacatgattaatttttgcagaccttccataactgttcaaacctttagcttattcttacttaatttaaaacaatcctttcaccctctaaattaggcaaaaatttgcattcctatgccatcttacagtcttttaccacaaacgaatttcattctcctcacacaccttgcatgtaaaaccattttttcagtagtctcaatcatatgttataatggtaactcagcaacatttacttttgatgcataaattttctttcacaaatcttttcacgacttacacagaccatgtttggacttcttgacttgtcctgaacatccctgtttttaaacagccagttattttactttaggacaagaatttactatacaaaatcctttctggtataaaatccattttctttataaccttctttgcatagctagggggcatggctaattctgaatgtcctcaggccttatctagaatctaatgctccaaaataggtaaactgaacaattttcaaaagcctaagaagcagtttatgaccttaaagcatttagcaaacctaatatctgacctgcctaatttagtccaaatgtctttattttaccaataatctttaaagctgtttttatttcccaaagattactaaagttacatggactaagacattacagtttttacttttctgacaaaatatttaagcacttatttttctggaagccaattaattagagctcttttatataaacattacacacataacacatataactacacagacaaattttttatttgtcagtttttaattttttaaattggattactggctttagggtggagtccttggaagaacagggccaggaaagcatgcagtttctagggcctaataagcaggcacagctggaaggcaaaacagctgcccaaaaattaagggtcttgtttttatactagatcttggatcccaaaaagaccagagccttagattttgagggagatttatccatatctaattcctggggttccatgaggaaaacagattttttttccaaatggggtctctggcacctcctgtttttcccaaggagtcccaggctgttaaagctttaatatctactttttattaagctgactttcaactatagcgcctttttacaaaaagtccttttaaatcttttattatccaaccctggctagccaaatggccaatatttctgtgttcagaaaaaggaaaatttaagatggttcgtggaggggaagagaattaacaaatggtaaaggccacacagttatggtgccagaaagtactcattcctgaagccaggaattgaaccctgaacccgggccgccattgtgaaaagagaaagcaaggccacatggttacaagatcaagctcccaagaacctaactgaccagtttgctgggctgtcttcatcagcaggcttatgaggtcctaggcacacgttttatcctaagatacccctctttatggcagaacaatgcagaaagacacacaaaatacaccagatttactatagctcaagatcagcctcagaattcttttcttgtggtaattaaaactttacaagagagataaacagtgacttttaccactcattaaaccagtttgcacagagagaggccagagtctgactggtaagaaattcttacccttttgccatcatgccaggcttctgggttccctttcccttagcagccctagtgaccctgcttgccacactgtagccctggggccaagccacatcataaaggaaaatcatcttttttttgtttgtttcatcaaccacaggcaaaaagcctctcaattttgcaagttgctgcccaaggcgttgcatggggtaacccaattaacattttttgttctggccagagtaaaatacatgagacaaaacgcagacatcagccactcagcattgaactggcaaggctcaaacttgcccctggtggggccctgtcttgtttaatccatttttaactgagagagactttactgaggggagggcctctaaccctatcccttcctttactcaggtaaaatgtaccccattacttatccaaagtcagccagttggtgctgcagtctttttcctttgtattgggatagtaactaagctgaaagattagcagatttaatttttcatttttaaatgcacttccatgcattgctgtttattcagaacattccgcagtaagttacctttagtaagagccatttctgtaagactctactgctttctgtacctaatgtgtaagcatgaaggaactcagtttttcagaaattaaggatctcatttttacctaaaatattggcttttctcttgggttcccttgattaacttagcaaataatttttttcctacctacgtgcagaagaaaaatgaaacaaaggggtagaacacaaaaatccccacaaaattttaaaagccaaattttacacccctacaatattatcatttgctaccagtttctttctgacctagtcagatgtaagaggcctctaactggatccaggccagttagttaccagattaaatccattcctagacccagtccagtttgtgtcatgacttccaaacccagtttggatcagaaatttgctcaaagaaactcagagaactcaaaacacaaatccactggacctccaaaatctgagagagaacttacccactatctccagccgctccgagagattagtggatacaagtgggtcctgcagttaccttgcatgttcactcagtgctcctgggggtcattagaagctcttcttcagatcccacttctgacaccatctgtcaaaagaaaaacttcagccaaattaaatttaaaggactttaattgagcaatgaatgattcacaaattgggcagctcctagaatcacagcagatttagagagactccaggggtgccttatggtcagacaaatttatggacaaaaaaaataaagtaacatatagaaatcagaagtgaggtacagaaacaactggattggctacagctcagcatttgccttatttgaacacagtttgaacactcagcagtgtatgactggttgaagtatggctgctgagattgagcttgttacaggcgcacactcctaagttaggttttcaatcttgtctgcttattaagttaggttgcagttcatccacaaggactcaaatatagaagtacggagtctttctcaggccgtatttactttgctttaacagggcaaacgaataggattattgcttaggagacaaacgtttgtagaaactttccaaaacaggaatagttcttctttcagagagtctcaatttggggttcttagtgtcttagaatcctctaaattgtatgcaaacttttgtgagcttgtgcctggggagagggccttgaggatatttaccaaatacggtgtactagacattgtgctgggcactgatatcacaaagattcatttttccatatattcatgtattcaacacagattgatatccgtctatgtcaggcactgggagcatagtagtgaacaaaacagttcctgtattcattggagctcattttctgggtatgtggagttggtaaagggccgcatccagaaataatgtataaatatatatagcatatcaggtggtgataagtgctatgagaaagaagaattctgggtaacgagagagtgacgggatggtgggggtgttaatagggtagccagggacatttgagcagaaactgaaagaaagggagggaggcagtcatggagtcatggaggaagaacatttccgggagagggaatggcaggtacagaggttctgggcaagcccctgccctgaatgctccagggtcagcatggaggctgtgtggctggagcaggagcagcaagggagagagtggtgagggataagaggagagaaggagcaggaggcctgatcagatgggtttggtagaccattgtagagaccatggctttactctgagatggaaggccaacagagggttttgaatagataagtaacatggtctgcctacatgttagaagcctcccctgccctctgggtgaagtctaggccattgagggatcagggtggaagcagtgagaccacaggctactggacgagtctagtggcaagttggtggtagcctcacttggggagcagcagcggaggtggtgagaagtcattcgtttctgcgtatgtggatatatttcaaagatgaatgttttacagagatgaataagattttttctgggttttcagagtttgaatctagtggggaaatcaggtatgtgacagattatttcagtacacgatgataagagtgtaggggtagagagctggaggagaatggagttatggaacctttcctgggaggattcagggtaggaaatggcaaaagataagctggagcggttggccgaggccagaccatggagggtctcactgaccatgttaaaaatttggactttatcccgaagttgatgggaacagttaaacagcattgctcaaggaggtaacacactccaattctcaatctaggttatccagtaactctggtgagtattagaaagagggctcggaggaggtaagaccaaaggcaaggtaaaccagataagatattgcaattgtccagggcagagaggaataatttattaaccacttgctatacatcaagcattattctaagcactttatgtgtgtgaattaatcctcaaaacaaaccctatcagtgaggcaccattaatatcttcatttcaccaatgaccaatgcatggccttgtgcagaaagaggaggctaagtgaacttcgttcaggaaggtcacacagctgtgagcaggaggaggatttgaaccccggcaccctggctcacgaattcaggttcttatacactgtgctacagtgcatcccatgaagataagagcctggagatttagggaaaataatggggtgaatcttttattttgtcccaaactgagttagtaagttttctgtatgcgtggctggatttcaaagaaatctaattaaaataaaattttaatttatattagtgttctagcagtatccataagaaacctaccctcgtaccatctccttttctccttacttagagcttggattgtctctttctttgcaatctcatgctgcctttctgcatcaatctattcagggtgtctctttggataaaacaatattttgaagtcatcaccttgtcaggtaacccaagaccatgcttttgtctaatgttagaaatttcttactattggaagtagtacattagactccgtgttcactggttctcttttccccatagcttgtgtttggaaacagctagaattaagtgaattaactcactgttaccagaacatggggttgttgtgaaataagctggtatctcaggaaaaagtgtatcttttgactgattactcagaatatagacgtagactgtaaatagtaatataacttatttttctaactgtcaaaatgtgaataatttctcaaataacttaaaacagaactagtatttaacccagcaatcccatgacttggtgtgtatccaaaagaaaataaattgctctaccaaaaagacacacgcatagtatgtgcatcacagcactattcacaatagcaaagatatcgaatcaacccaggtgcctgtcaacagtggattgggtaaagaaaatgtggtacatatacagcacggaaaaccacacagccatgaaacagaacgaaatcttgacatttgcagtgacatggatgcagctggaggccgttatcctaagtgaattaacacagggacagaaaaccaaataccgcatgttctcacttgtgagagctaaacattgagtacacatggatacaaagaagggaacagacaccagggcctacttgaggggggaagaagagaggggggcaaggttgaaaaagtattgagtactatgctgagtacttgggtaacaggatcagtcataccccaaacctcagcatcacacaatacacctaggtaaaaagcccgcatatgaacccctgaatctgaaataaaagttgaaattatattttaaaaaatgtggagaatttgaatagtgcaaggaatgtatacagaaaacagtgtctggagaatgcctgacttagtttgccaaaaaagtgtcggctccgctgccttgcctccagtggattacccctaggatgatcttatttccctttctgtttagattcagggaagtactgagcatcagcgtcttttccgtgtggctgttactgatattgttacagtttcataaagaacaatacttatcataccttaggccaaatgttctccaaaacaaaaaaaaagtaaatagaaacttccagccctgacaggtattcaagcctaaagtatgatacagagaaacaaaaaaatagaaaaaaaattaactgttcacataaagataccctgtagggacaggcgggtgggaggagtgttggtaaagccctagtgacagggcttgagggccacagtccctgggggcctcagtgcatattattggtgtccctgtttgcccaaatggcagagattgtgggctgggaagggagggactagttcaaagaagatagcacaatgtctgctgcagaaaccaaggggcatgagttttatttgggaaaaccaagagggatttgaaatgagtcagtggctactgagcaagcagggttcagaagtcccacattttccagaaactcgagtgtcttacaacacaaaggtcagtgttctcagcacaggctcaggcagctctaaagcaacagccagccctacccagcccttccttctcagctcacgttccaggtaaggagcgtttttatttttgaaatccaggtgcacagtcaggagatgggaggaaacagtgacacccatctttttaatgagcattgctactggaaaagaaattagcatcaccctgaattttatgtgatgtcagttaaatgaaggtgttttatagcactttacaacaaattagaatcaaccaaattgaaaataagcctagcagctgggataagtaatcaggtaagtggccagttttgcttatttttactttgagctgaagacagaatttgaatttttaatgtcccagaggtgtgagattcacaactggggagtgtggtttctgggatgattgtttaagatgcaggcagctccatcttgcccttaggtctccaagttgcttgacacattccctggaaattggcccttgtatatatacgtgtacaccggagagagggttgtgaattagtgtaggctagagctctgcttttgactgaacattagagagcagactggaaatagatgacccagaacaaggcagtaaatcatccacattaactgagaaactaatgaaaggactgaaatttatacgaagaatttatggccactcatgaaatcagcccaaatcagaggaactattagaacacttttatgttttaagaaaatgggtactgtgttcatttgctgtaatttgcatgtagtcagagtgccctgacatgataaatactggctttggtggacaggattttacagcagagctttgcactccatgagccaatgtttcttgcataaatgacttgatgattttagtgtctaaaatatgttcagaaaactgttgaaaggccacaggaagctttgcgatgataactattctggaattggtgccctggggtgtacccgatatgtgtgtgcttgcttatgtgggcaaaagaaagaggagaaaaagaggaggcagatgggaggagtgttggtaaaaatgaaactgcagatcactcagaatggaagtattaaaagggcaacaaatgaagataaaatgatgcttgcaattatggtttataaagagaaataggccatattgagtacataatttttcttttttctcctctgcagctgatggattaaatgaaataaactaatctgcagaaaatccatgtatctaggttgttgtcagtcgaccttagagaaaattaaaacttgcgcagatttcttactactttctacttaaatttttctacttgaaacacttttctcaaaatacttgtatgtgtactattttatcttaaaatttttttatcttaaaaaattcaggtaacttcaatacctaactactgaagcagcagataattttactcataaaaaaataaaaatgacaaacacgacattctcccataatttcttcagcagtaacttctccttccctaagcaatagcccttatttgactttcaggactttatacttcaggtgtggacatggaaaaagtaagttttaagtttccatcatcattagcttttgataattctgttcattagcagtaccctgagccagaggagtaagcagaaaaaactgacttctctactggagtatcagatagatcattacaccgtgaagaacaaggacagatctccaatgaatccagctaatactgaaaacatatctgcagcactgagctccaaactgacagcgtctactctagtgcttgaccctgttcagcaaacttgggtattattcaaggtggcacttccctggtttgacagatcactgtgctctgaaagccttaaaacatgcgcttgagttgtagaggttatccactgtattttgttgccttgataaaaatgggttcagagaattgagtgaatttataggacaggggttcaaatgtgctgaccttctatttccagagaaagcctttgtttttttttgttttttttttctccccactacctctcctctttgttttgtactgccctctcctggctaataaatttcttagtaatgaatatttagagaagccaagtggcggaaacactgggggctgctatcatttctactttccgttagaaatttcagattttattatatgaaatgcagagttgacatacagtgattaattcagatgtgcatagatacaagattgctgaaatgatatcaattgttgtagaaatatctgtatgagagtaatttggtcatttatatggactttgcaatgtttatgaaaaatgattttgcagtttattgcatcattagtcaaattttctgagtcattgatgtgaaaatccactgttattggaaataatctggaaactttctctctacgtttatattttacagtggctgctaatttacagaagattgtagatgatcccaaagctttaaaaacattgacatttaagttggtaagtggaaagttatggaaagaaggaggtaatattttgccatgctgtgccagcagggaataataatctagtttaataacctactctgtaattttgctgttgttgttttcttttagaatcaatttttgcatttggaagcatttgactctgcagcgttagggaacgttttctgattgtgactggaagtgtcctcttctatgagcatagctttttcttatcgtcacacctttgactaagagcggccatataagaatcttgaagcctagatcattttgcttgcagtttgtattgcaacttgaccataaagacaaaattacactgaattcaaagcaacactcttaataaagctttcctaagacaaaagccaagtggttctaacttttaaaaatagaggctgattgttgtagaaatggtttaggtaattggaagcaattgtagaacaactcaccaaaggctggcggacaaagacacaacaatttacttccacatttcaaatcaacagtaacagatttttgtagaaaggagatatttcaacagttattctgcactagtagattgtaaacttaagtactaggtggccacagagatacagagtgccggacattctggggtcactgtgagaccaagatggtggtggtcagaaatggagagaagtccagatagtcaaaagtgaccgttttccaaaaaattttagcgaacagtacattaaggtacattttaaaaatcgtaagttaattttatcaaaggctggtcagaatcccagaagcaattttagatctagatgaccaacactttgctgtgcacaacatagattgatgatcttttttatatttgtgaaattaaatggaaaatgtgggtgaccaaaaatgctaaatgattagttacagtaaatgtgagcctggtgctaattaacttcctgggtcttgcttcccatctaattttagatagctaggctgtgtgataaaagaaaaacacaaagattttcacagaaaagatatatctgaaggaattctttttgctttgataagaaagtaacattttattcagatgtagagtgctaggttaacaaataggaaaatcccttttctggtttgggatgacactgtcacctcttaatgtgtgtgttttttttttttttaatgtgagagtatattgatgagaaaatggcagcctgtgtcagcatttcaagccaatatatgtccctttattcatttttttaataccacctcaagaacattttcctaatttgtaatatgcaaacagagataagagtttgaaactctcatgctggacttttctcattttattatgaaagaggaacagtaaccctggccctttcctactaccgaagattttgtgaaaacagccgctgtacaatctctaggtaaaccataagaataatgtaaaactctccctcatctcctaatcagcttatatgtttcttaaattctctctggattctgtcctcttccctgcatctccatttcctgcacccaagcaggattctctcatcttcacaaactaatcttcctgccaccagtttgtcagcttttggctctgtttaccaccctgtgcctgtagccagagtaatcctcctacaatcccaaaatgtggtagacacagtgtttccactgccctattgtaaaccgcacacccgggacaggctaatgaagcctggtctgcccccactcctccagctctcctgctttaccattatctctggtagtaggcccatttcacatctcgggaacctcgggctcgctggggtggatttgcccaggatcacacagcgatcacacagatcctgagtctggaagctgcagactcccccctggtctagcctcagtgcccacgctctcaacagccattcatcttggaggcagacccctgcagccttagggctgtacagttttctgtcattttgtagattcctcattttggatgactgggtacatttacattggctgggactgaatctccattggctgagactgaatctcctttgtaccttcagcagattgagtaatagtggcctgtcaggcacaggggagttttggaaacaagtccgtgttttccttcccattacagcttgaaaacgtagtagtgtggtgttcacagtaaatggaaattgatggcttattctccccaaagataaagatggttaacgaaaaccaaactcaggagggaccttatttctgtcacttaactttctgtccagcccttgttaggccccaggagggtttctttgttggtatcagctgccagccggtttgagatccacttggcagagctaatttgaactggtttttggcctgatcttgcataggacactaacatcccaataaactgcagagattcaaatgtatttaccttcattcatcaacttggttattttattcaggaataaaagatcaaagtatttcagcagcgtttttcctcgtaagctgctgctgcgcatggtccctttatctctcagctttttatcattattttcatctcagtgcctttcattactttttaaaggaaaacgtcaggggcctgaaaattgtctaaagaacagcagtgtcatgatactgtggttctttacctccctgcacagtggtttcactcaggggagcactgggacactttaaaaaattaatgcctagggccgcaggggtgcgcctccaggaatgaatggttgttgagagcatgggctttgagtctagaccaggggtgagtctgcagcctccactgtgtgatcctgggcaaattaaccccagagagcctggggttcccaagatgtgaaatgggtcctgttttaggacctaatgtctggtcttacgacagatattcttatttaactgctcttggtgcagcctgggctttgggaatgttaaaaggacttcatggtggttccagtgttcagcaaaccctgagaagcattccacagggaagataataagtaggatttccattgttggtatggccaggggctgggagatcagattcttctcttcacttttaacaaagtggttcaggcatagagggcatttcagctcaactattatgtgctttgagtttgatgtatttttttttagtagtgttttattgttgtaaaccttgagacaggtctttatttttaagccatttttgaatggactacttggcagttttgtaagtaggtgaatcttcctgctttcaatgtggaatttttgaaattgcattagaaaaaacatgaaataagatacacttaatttgcctttgaagatagaatacaaattttgagaacatgtaattaacatctaattggtacacattaacatgagcattatagactttagttactgaagtttaatagcattatatgtattgcagatagaaatttcataagcattttcacagtgactaaacggacttatttttagaggttcttagcttctgcataattggaggctgtatgactaaggcaacattttgccaagtgcaggtaaagtcaagcctgaaactgggtaaaaactacctaagcgttttaactttctcctcctactgaaggggtagaaaagtgagacaaagatcttcaaggaaacttccagttccagaaggtccatgtctctgtgcctcctactcccagcctaaaagagtggctgtccacatgtggcccccagactgacagtgtcagcttcccttgggaactggattacaatgtaaattctgagaccccatctcaggactaaggaatgagaatctcttgggggctgggacacaggcatccgttttaacaagccctccaggtgattctgatgcaggctgaagtttgagaaccaatgctttaaaggaaacttgtagtttcacactgggaagcactgggatagacgagtggttctcagactctatggtgggggggtgggggcacctcacactctcctagtgattccaaaatgcacccgcatttggggtggaggcattccttttcagtgacgccaggtaaccataacttcagctcctccatggggtgcaggccacacctgctgtcatggcgggaggggtgaggagatggagtgttcaggaatcagaatacaccctgagtaagagcgtgcatgatgtcatacgctgtcacattaggtccctgataatgtatacattttcctttggcaggggaggcaaactgttatctctgccttcttagggttttttggctgggcctggaagtaaaccgacataaacagattaacaggagaaaagcatacatatttatttaatctaagttttacatgacatgagaggcctcataaagaaatgaagacccaaagaagctgttagaatttagcacatatattgagttggatgaagcaataaatgatgaaagggggcaaggcagtggggggctgggacgagggttcatcgtggagaagtgactaggaacacgaggatgagtttaacaaggtttgtttgtgtagatgtctgtcaggggcttcagctccccatctctggtgatcagaatagctttcttcttccaggtgcagggaggaaaccttccacttgggagttttaactcctgcttttaggaaagtcagagggcccttcctgcatctgctgctgttgttttttaaagtgtctttaacgcaaaaccatgaaatagaagagtggcatattttggggtagcgtgttctgaacttctccttcactttgaaattgaggctcacaaagcgtgggcctcaaacttctgagtttccctgagacccttctaggggatcctggatgtcaaaactctttgtgacttgccttttccactgtgttgacgttggtgtaaagccgtggtgggtaaaactggtaatgtcggcacacatgcagcaacatcagactgcactaatagtcactgtgttcctcagagccaggcactgtcactcactgtaaaaaagcaaagccaatttcacttgagaattttcctaacaaggcaggaaacattattgactttattgaatttcagctacaggacacatcttttgagtgttcagtgctatgaagtgggaatccctccttcattatacgggtgtacattgacagtcttcaggaagagcacttgtgagattgtttggtttgagcttacctacatgttttttctttcttcatgaaacatcatttttacttgaaagaatagctgacaaactggtttttcagactcggatatttggcagacatttttttcagaatgaagtaagactgacacttaaaaaaaaaaaaaacaaaaagctgatggccgggcgcggtggctcacgccagtaatcccagcactttgggaggccgaggcatgtggatcacgaggtcaggagatcgagaccatcctggctaacatggtgaaacttcatctctactaaaaatacaaaaaaaaaaaaattacctggacatggtggcgggcacctgtagtcccagctcctcgagaggctgaggcaagagaatcgcttgaacccgggaggcggaggttgcagtgagccgagatcacaccactgcactccagcctgggtgacagagtgagactgtctcaaaaaatataaataaataaataaataaataaataaatctgacaatatttgttgttgataataaattcaagctttcaagcaaaaataggattttggaaaacttgtatcgctactgtaagcttgacagtaacccagtacttaaagacttttctgatgagattggtgatgggtgatgttaatgggtatgatttgttgacattgtataatgaattgttcatattgtataatgaaacatgtcaacatttagaagatctgcataagtcagtgatgcttaaagtcatgcatgggtaaaagatccactcaaagtgcaaggtagaccaatagattttaaggtaacagggtatgaaaacttcaatactgtggtttcagagtgtacattgcaactaacattaaagaaattgccacttggaaagttctagtgcagtaataaatgatatccacaactatttggaaaagctatcaaaatactcttccctctttcatatatatttgtatgaggctggatttttttttcatgtgcttcaaggaaaacagcataaaacagtagattgaatacagaagtaggtatgagaatccagctgtcttttattaagcaagacattaaagaggaaatgtagaagtcaggccactctttgagttttcttgcagtgggtaggggaactatggttattttccatgaagattttatttatgtttgtatgtaatgagtttattattgttaagtttaatgaattagtaaaggaatatttttaaaatgttttagttttaatttaagatagtataattaatttatgtaaacctattttatgtttttaaatgtactgtttatattattacttcaatatcttgacataatttcaaataatatatttaaaatactttttaaatctctcagctttaatttctaagacagtcagtctaacgaatataacccacataagcagacactttttggagtcctcagtaattcttgaagagtatcaagagatcctaagaccccaaagtttgaacattgctgttttgaagggtcattggttcctttctctgaatttcagagtcatttgcatatcaccctcatttgtgctttgcaagctgagagagccctggactcagcagtgagagcccaggtagcagaggaaggagggctgagcgccttgaagcaaacacagccaaaggtcctggccaggagacagacatttcagtgtagctatgggaggcactgaggacccagggtgggtaggaactttgtgaagactccttctgtgatgttctcaccgtaaccactggtttatcacctactctagtaagttctcatttccattactcttcacaagaaaggatttaatattctcatttctagtcagttcaaccactattggatattgtagttttattctagtcattttaacctcctgatattcacattgccaaatttctgatgaagatttgaagtacattggtgtacttcacatttggcaatgtgacctttttgtcaccaccagcagccatagtttgtctttggatgtttgtcagttgcctgttaattacacaggttgtctgccattattcagtgggttgagtaaatgatgttaacaagagctacacatgagagagaagggatgatttaggaaggtagataaagaaacagtgataacacaaggagaaaatggatagggaaggtgaatattacagtgtcagtgtgacaccaccagaaatacctcagccaaaatgccctctatgcctgtactactttgttgaaagtgataaggagaagagcatttcagacctcatcgcccctgtcaacacaaacaatgacaattttacttctctgaacatctttatctgtcagatgaaaccagagatatcactggataggtacaaagtaaattcctttctttaaatactgattaatatttttatcctttaggctagtgacttttttacataagcataactacttacataggatgttattttaaagataatcatttgaaaatattcaaggtacaaacattatagttagctgattatttaatagaaaatgctagagttgatgctggttttctgtactgtttttttgaacagttcaaaaaacagtacactatgaacagtacagttcaaaaaacagtatagtacatattctaaatgtatacaagcagtgctatgcagcttaattgtggtgattggaaagggcacgtttccatgggaaactaattgttgtgacaataatttagcaggaattaggctctgaaaaggtttgtatgatcctttggtaattaattgcccattcccagtcattcatcatacttttttctcccttccttgttgttcttatgtaatgtccaattctgatttatgtactataggatgagaggcagcttagaatggtggatctgagggggcggggggggagagagagagagagagagagagagagagagagtgtgtgtgtgtgtgtgtgtgtgtgtgtgtctaaaagcaagcaagggggagaggtcacaagaaaaacgaaataacttattaattaggaccagtgagaggtttgaagggaaatggcttccttttttttttttttctgaggtggagtctcgctctgtcgccaggctggagtgcagtggcacgatctcggctcactgcaacctctgcctccccggttcaagtgattcccctgcctcagccctcagcctcccaagtagctggcactacaggtgtgtgccaccaaacctggctaattttttgtattttagtagagacggggtttcaccatgttggccaggatggtctcgatctcctgacctcatgatccacctgcctcggccccccaaagtgctgggattacaggcgtgagccgccatgcctggccaaggcaatggcttttttccagttctgtctgattctgaagtaagaaaaataaagtatttgacacaccataatttttgccaattttaggcaattaatatgtctgaaaatataaacaaaattcttttatagaaaagaattgttataatacctttccctgtaaaacttattcactggtatttatatagcagttctctctaatgagcccatcgcagtacttggtgatgactttttcctggcaagtttcatagaagaaatgagtttggtaaaaactaaattactcctgggtgacctgttagatctcttctgcttattttcatgttgttctcagaatgattactaaggtgatttagttagaaagtatatttaaaataattttatttagtttttgaaaaatttgtttgtggtttcttagcaggggtgtttcactgactgttccaaagcttccagcctgggcatggtattttaatggataacaaatcccttcccacctctgttctgtacttcatagcatgatggccacagtgctgacagcacttagcttccagtagtcattcgagagagtggctggcgtctctcttctggaagaaatgggacacatggtcccataccaactgtgcctttgcttagatctgccatcataggaacaagactttaacaaccagcagcagcagcaaaccagcattgaggctttctttttcccttttcaggcttctggctgtgatgggtcggagattcctgatgaagtgaagctgattgggtttgctcagttgagtgtcagctgatgtatgtcccttgatgtcaccctgatctgtcatgccccaccgccacccctactcccttcaaccctccctctttctgcccatttcctcccaccccctcactcccatttcctagcaaaatcagaagattgtgaagaggccggcttcaacaaaatgggataaaaaaataattttttaaaacttacaacactccgagttctgctttattctctagcaatccacagtacaagaacaagcaaatgccacagctgcacgactgttgctcatttttccaaaagctatttaatattcttagcaatcaatttggatatcccttaagtgaaaagaatctgaaatacactcaggtggtcttatttattggcaacaaaaggaattttctatccagaagcctatttctcctttcattgttgttatttctgttataatactttaattgtacatctgacaatactgcctcttttatgttgtatttagaaattaatatacttataaaattaagatttattagccaaacttgaattctagttttaaaactgactgtgaattttatttttcatatatttatgcattacacaccttagctataagaaaaaaagggttttgattatatgcttcttgcagttaatctcgttatttaaacaaaaagttttgggtctgtctttggagtatttgtaacttctaaattttgaaatgactgaattaggaatttggatgcttattcttttagtctgtttgcctaaaaaccaatttacaatctgactgtctcttgggagagggaggtgccttgcaaactttcacattaagaatgtgcctgaggctgctttactctggaatagtctcagatctaaaatttcctctatataaggtggcatatgttaagttttgcttcattggaccgtttagaatgctatgtaaaatgttgccattctgttagattgctaactatatacccatctctgatttggctctccttaagtgataggatttgttattctaaaggtgataaacttgaaaatatcagaatctgagttttacttgaaattttgcagaatacccaggtggagtgaaaattggaagggttttgtgcaatgactaaaaggtaaaacgctgttaaggttcaagaatcaatactttcaacccaagtagccctctgcttgactgtatattatggaactagtaaaccttaggattttgaaaattggagtctaatctttcaaggaggtgggctcccaggatggtaccattgctctttcctagctaaccctagatatggcagctctttaatgtacttcaaaaagcaaatatatattactaaggaaaaaaagttatttataattgccttgtcataattgttaaggtgttctagagccatttgcatacaatttaatgtaatttcattccattctattgtttacacaacgattactcgaagatgactgcaaaggtaaaaggaaaataaaagtgtattgcacaatgag

SEQ ID NO: 128 - DNA, 2315 bp, Homo sapiens
gcatgtggcttggagagggcaggtgacctggcgtggagggccagagggtaaatcctcaaacaagtggcaacaggccaccaacttgaaagggaaaattgtgtagtgatgggaaatgtgtccaacaaacctactgggtgactaattacaaaggctgggctggagcttcagaggctgcttgttaaacacttcattaagcggcactctgaaagctgccacctgcgcattctgggagctcagaggggaccctgagggggaatgaggcctggaggatggaaccatcttcaggtagactgagaaggagcctggatctcacttccaaacacagtctggagctcataggtcagaggcctcaatgggagaaaagctaaaggaagagggtgcagaaaggagtttcagggaattggtggctatgtgactttgagcaaatctcacccctctctgagacttagtgttcccatctctatggtcctgtgtgtgtcacagagacatggtggggattaaattcgatcgtgaatatgaaagtgcttgggaaactccatggccctacctaaacatgagttatcctcacctgaaccaaggggggaagttacctggcaggattaggaaccccatcctcctgaacctttatgggctctgtcgaggctgaagcagccaggggctaaagccgtccttagcccctggaagggcactgtgaaagtggatctgatttgagaagccgtttcctgatgtgggcagccatgtgatgccagccccgaacaagagggggcagcctggagcctggaaaggtgccagtgcaggtggggcccacgcccagatttctcctgctgactgttctgatgattcacccccacatcccagcctttttacctttactgcagagccggaaagggtgtggggaagagaggagagggaggcaggtcttgggccctggtcccgccccctgctcctccccacccttctctgggcctggccacccagccaaaaggcaggccaagagcaggagagacacagagtccggcattggtcccaggcagcagttagcccgccgcccgcctgtgtgtccccagagccatggagagagccagtctgatccagaaggccaagctggcagagcaggccgaacgctatgaggacatggcagccttcatgaaaggcgccgtggagaagggcgaggagctctcctgcgaagagcgaaacctgctctcagtagcctataagaacgtggtgggcggccagagggctgcctggagggtgctgtccagtattgagcagaaaagcaacgaggagggctcggaggagaaggggcccgaggtgcgtgagtaccgggagaaggtggagactgagctccagggcgtgtgcgacaccgtgctgggcctgctggacagccacctcatcaaggaggccggggacgccgagagccgggtcttctacctgaagatgaagggtgactactaccgctacctggccgaggtggccaccggtgacgacaagaagcgcatcattgactcagcccggtcagcctaccaggaggccatggacatcagcaagaaggagatgccgcccaccaaccccatccgcctgggcctggccctgaacttttccgtcttccactacgagatcgccaacagccccgaggaggccatctctctggccaagaccactttcgacgaggccatggctgatctgcacaccctcagcgaggactcctacaaagacagcaccctcatcatgcagctgctgcgagacaacctgacactgtggacggccgacaacgccggggaagaggggggcgaggctccccaggagccccagagctgagtgttgcccgccaccgccccgccctgccccctccagtcccccaccctgccgagaggactagtatggggtgggaggccccacccttctcccctaggcgctgttcttgctccaaagggctccgtggagagggactggcagagctgaggccacctggggctggggatcccactcttcttgcagctgttgagcgcacctaaccactggtcatgcccccacccctgctctccgcacccgcttcctcccgaccccaggaccaggctacttctcccctcctcttgcctccctcctgcccctgctgcctctgatcgtaggaattgaggagtgtcccgccttgtggctgagaactggacagtggcaggggctggagatgggtgtgtgtgtgtgtgtgtgtgtgtgtgtgtgtgtgcgcgcgcgccagtgcaagaccgagattgagggaaagcatgtctgctgggtgtgaccatgtttcctctcaataaagttcccctgtgacactc

SEQ ID NO: 129 - DNA, 9630 bp, Homo sapiens
agagagatttgagactgattccatcacattccccatctgtgaacgggatcatacctagacagcccagccctagaactgcctggtctgatcctaagtgttccatggagattttgtttttttaatgtaatgaatgattaagtcagcaaatactttacatctcttgtgtgctaggccctgtgccaggtggtgattatgggccctattctcaaaggactcctggtctccgtctgtcacttactttagaaacaagtcatctagccagagccagaagggcactggagatcactaatcaatcccatcattacatagctgaggaaactgaggcccagagagtaactgcaacatgttaaagactacacagggagcaaatttattttctgcttctaagccaggtggtttggccacagataggccaagaagaatacgaacagacaagccttgctgggtttcccactcagtttattactattagaccattccctttttccccactcacatttctgcgcatttccatggtcttcatagaatctaagcctaaaaatagagttttccttgagtctttgggtcttcatttctgaagactctcatgtcacagaaaactttaattaaataaatcgttatgcttttctcttgctaacctttttctacaggcatgtcagctgtgatccttatgatggggaggaaaggcaccccaccttctctgtccctacagtcctaatgccctacccagaatggggttttcaaaatcccaggacacccactctttgtttcttaagcactaaacctatatatagtaaatgtttctggaagtttaacttcagctcttgctgaaattttaaaccctcaatttccagaggaccatcgccaggtgtttttaaaacctcgataggaataagaaatgcttcccagaatggagacttccatcagttctagggagctattagcccccttgccctggctgtaatggagaccgctgtgtctgcctcctttcgcactttggagccaaaagaggaagggaccgcctcccacgtccacagggacctgacttccacctctctgcccagatttgcttatgtcactgtcgccccgggacggggaggtggggagctgagggcaagtcgcgcccgcccctgaaatcccagccgcctagcgattggctgcaagggtctcggcttggccgcggattggtcacacccgagggcttgaaaggtggctgggagcgccggacacctcagacggacggtggccagggatcaggcagcggctcaggcgaccctgagtgtgcccccaccccgccatggcccggctgctgcaggcgtcctgcctgctttccctgctcctggccggcttcgtctcgcagagccggggacaagagaagtcgaaggtgagtgagcctccgggccgggggccgggagaaaaaacctagcccctcggtgtccagcgctcagtgcaatgcaccccttttcccaggctccccgccagatgggcaatccccaggtgcgagagacctcctgaaccccttttgccgccccctccgccgccgggaccccgcccccgaccgtcgtcgtctcgtagttccatctgttggagagccgagacctggtgcttcaggcgggcagaatgactaagggaggaaggtctctctccccgagctcgcactttctccccactgccacctcgagggtcgccttgctacatctatgtcacctccgtgcctgagctgctccccttcagtagggcctaagagggagggcgtcacagaaaaaaatgcccagcgtctgggtgggctgtgcaagttcccagggagagagacaaggagaaaggagagaggcagctgggtggtcctggtcctgaagaactgctgtggggggctcttctaccccaagaatgatacaggcaggtagaaatggccacttggattcagggcattggtagaagaggcagagatctgtgctagaaagagctctggagtgacagtgcagaacactcaggaccctgagtccttacctgctcctggacccccgtttctccatctgcaggggagagtttgggggtgggagtgcatggggcacaatgaagctgagggcctcagaggggatgcttggagaagctgaaaaatccacaagctgttctctgaaatttcctcccctggggcagcctcactacccaggacccactgtcctcattagcctgaggaaacctggtagttggagaaagctggggactgctaattcagaagaagaggtagaattctctagagcctcagtctatttccagcaggtgtgtggcccacacctggagtggggatactgaggccaggagtgggatgacccagcatgcttatctcctttgacagtatgtactggggtgggctctgtagacctctcctctacccagggagtgggagtgggtggggaaggaggcagaagccaggtgtagggatagactcaaagcgagcgatttctgtctccaacttcccaacatgcataactcacatttttgcaagctctgagcttttgtttctaaaatcctctgggtcttcactttaattaagttcttatgagtctaggattccgtttccaaaattctgtccacttctcaggaagcccattggaagcacagggttccttccatgttactcaccccttttcggtcctcagcctaaatccgattaatcagcctctccttggagtcagtctaaatggatgtgaagccacttcgtccaagtcccctcctttttatccatccctgttcataatccccaactcagaaggcattttccaggtcaggaatgggatcgattttcaacattgaggtttggggtgggccatagacaggccagcaccgtggagtcagtcccaaccttcagttttggaaaggtcaaagaagatacaattgggccctgcctcaagaaggctagtggggagaacgtggactccatgaataactcatcatagctgtgtcttctctgcagcactctggggaaggataaatggactcagagagaataggatggggatggtctagaaaagttttagggtgaggtgtgatcatatcacatacaaccagtcaggacttgctggctaatgaaagcctgggcatgcccatctctgctcccaagttcttagagttcagatgtcttagctctgggttaggacccaaccactcaccttacccccaaccccagggtaaagagatagggttatggggcatgtggagaatggaatggacgaaaggtgactcagccccagagaggtgttttcctcctaccaattgaaagggagatgctagggaagagaccaggtcctcctcttcttgctgcgtcacctccccagtccaacttcaggctgcccacgctccttgtctctacaaaaggactgcagaagccggaaagagtgacaactgctgacgtgcacgggatcctagtaactgctggtttctaggtgactaaacctggcagagagaatcatggaaccacaggctgacagagttaaagggcccttaagacagccctgaacctgactccatcttacaatggaggagctggagccccagcaaagggggtcacatggcatcagagacacagcaaagcccagcactcaggtctcctgactcccagaccacttctcacagcatcatattgataggagtaataagacgggagaggagaaagacacaagaccagcagccccagccagccagagtcctggctgagtcccatcatccaactctcaagccattggaaccctcttctcttgcccggctgtgggaggattcaggcaccctcatggcctctccccttatctcctctggccactgtttcagatgcggtgctctgggattccacgtgcccagagaagggaagggggctcatagaggactgagttgcagtgatcagtggtgagcacagccgtggctctccacccatgggccaccttctgacccccactatcccttgacatgagatttcgttccaagagactccaggcctgttttgctctgccagcagattcccacaaccattttgggcagcagcatgcttatctccctggacatatgcccagacagtgtaagtgacttgctcagggccacacagccagcaaaaaatagaacctaatgaaatagggttctccttgccacacccccaagctgaaactgtgcccagaagctggtccttctgtttacaagttcccattattaggacaacctgtaatctttttttcctccatgtctcagagttcatttttggatcatggcagagttaaaaaagtggagaggctatagacatgcctggctttctggccactagatctttgtggcggtctagggtgtatttgttgtgccccagtttgtctgcattttaaggcggaactggccctggctgggaacgaggaggtccaggagcagtaggaatgttgatcttaggtcttgggcctgcctccagcacccaccaaaagtcaccggatgtggaatattagactcatgtaaagcaggaagtttgcaccagagccaagaagagagcttgcagctgccagggaatggcctggcggaggaagcgcagcctcgcccagctcagcagacctgcttcatgacagaggcagctcttctgcactctactggggccacgccctgccagcatatatcactcccttcacctggtcaggcccaggtaccttgcctcaacagcaagttctccagaattgaggggaagagagggagtgaatttgcttctctaactccagccacctgtctctgccctctcctggtctataatgctactttgcattccatttgtttattgtctgcccacctctcaaaggatatcagggccacaaaggaccttaaagaccaccttatacaatggtttcaaggtttctcctttcccatcacgaccagcccacctgccaaattgtgtcaatgatgcaatgacatcctttcaagaatagtctcagaattttgttgtctgtgtcacgggcagagtaggctcataggccacatcctactagccagcagtgaccccaatcccctctctcccactgatcatgatcctatcaagccatcatggttgacctggttggagagttggttcagttcaaggttctcattttataaatgaggaaactcaggtccgaagaaaagaaagggccagtccaagaccacacagggagttaatggcaaagggacatggagcccaggtctcccagcccacagtccactgcactctgtccctccttgtcctggaggctgactgtgagcagcagctggggagggaggaaggcataagggtcatcaccagcctgctcagacccggaacattaacacatgcaggtactgttgcttttccctacctcaccacagccctttcccccatgcctggctctcagtcctgcttccctatttggtaacaacagcttcatctttcctgtcctgcagattgggagcctctgaatcaccatgtccatacggcctcttcctcctttctgttcagtttttccttcacactggcctagttcaggttctcatcctcaattgcctggattattccaacagccacccaaccagtctccatcagcccgtctaggaacccagtcatcagctttagggcagtctccctgagagcccagtaaatgttctgaaattgacatgtgatgtggaagtaattagcaaaataagtcattctccagggttccatagcactcacttattaagtgcttaatattaataagtgcttattaggtgcttaatattaataagtgctttttaagcacttaatattaagtacccgaaaagcacttattaagtgctttcataatcattatcttaaacaaggaattaggagacgtcagtgctagtccagttccaattctcggtgattactttgagaaagtcactctctctgttgggatctttcattcttttgaaaacggagatgtccaagttcctttccagctctaactgctccttttatggcctgtgttccagatggactgccatggtggcataagtggcaccatttacgagtacggagccctcaccattgatggggaggagtacatccccttcaagcagtatgctggcaaatacgtcctctttgtcaacgtggccagctactgaggcctgacgggccagtacattggtaagagcccacccttcctccctgctttatttggggctgtatggcatatttcaatcacaggagcttttctggtgcatgggggaaagggtgatggcaatcacgagagtccaagccccttttctcagctccactgtgttccgtggttttgtgaagatgattatataagcctgaggtctgattgcctttggacatgttctaggagattcctagttatccttcttcatctctgggcacctcaacaaccctaaaggcagagggatagagattaggtttgtgcttagagctccctttggctggagcatgagatggtaactgaagctccatcttgctgagaatatcttattttccctcagccccatctgctttggtgcttctcttggcagctctctggaaagcaggcaattgcctcgaggccccagagtgtatgcgtggtgtagcgggatgaaggagcaggctacacttctaatgcccattctaaaataaactttgaagatgatctagtttagccttcccctcttctcaatctacacatgggaaaccaagactcagagcgaagatacaacttaaacagggtcacaaagctattagcggtggaatggggcatttggcgcaggtttcatgatctcctgatatgcttactcctttctccctagctggggtagaatacagaggctaggggaacaggcaaccaaaggcaagcgacagcacccaggggaaaacgctttggggctgagcagtctactggcagggggtcagggaggcaagggcaatttgaccctccatgctctgcctggcaatcacaggcgaattcccggaagtgaaaggacggcggtcacgtggcccagtggctgtgagtgctttttctgggatgcttctctctagccttggaacagagcagagtgcgtttgggcaagagatgggctgggtgctgctgcaaaagagaccaggggacactgaggaaactggggagctgggccagggcctcatctgtgttcctgatttgccaaagattatgggagggttgtaacctcaccccaaagaagttctctgccttgtatccagggatggatagttcttgctccagaaaactcaatcctgagggttctgaatgagtgctctagctggcccaggtggagggccttggcaatgggcaggtgactgacagctgacttgaggaagggtattattcttgtcctccaaacctccaatccatccagattagagtcaagaggataggacctgagtcccagcattgctgtgaactcactggtgatcctgcgcaagtccctccctttctcgggcctcagtagttccagcggcacagcgggtgagccgggggagtggtgtggatgagacagggctcctcgccaggatactcccacatctgctctttctctttggcccagaactgaatgcactacaggaagagcttgcaccattcggtctggtcattctgggctttccctgcaaccaatttggaaaacaggaaccaggagagaactcagagatccttcctaccctcaagtgagtactcactcagcatcctgagaaagctcctctcacatggcccacatcttgttatcaaccccaaatcatggtggacatttatcggccaccaagaactactctcctcttctaggatccccagtggaatgagggaagggaagggacaagagagggagaaggacagggacaactggttgtgatgtgcatccgcagggagcaccaaggttgagggacactgaaaagggaccaggctagaaaggaagaccgtggactcacattatgcctatgcccactgcacattcactggctcctgctgcccactgcagaataaatccagactcccaacaccctctcccctgttctgtcccttcctctcatttctgagccctgtgcccacctccttgggacccacctaagaacatttctcaacaggtatgtccgaccaggtggaggctttgtccctaatttccagctctttgagaaaggggatgtcaatggagagaaagagcagaaattctacactttcctaaaggtaagtgagctgccacctgtgctggctggggctgcagcccctcctggctccagcccacagcgtcagggcccatgccacctcccctgctcctgggctcttggggaatttcttggcacctgactattgttccaactagagggctctgcagaccctgactagggtctcattggcccattttacagaaaggcccagaaggacccagagtgaacatactaagggtctcacaatcttctagagccacagctggcgctggcagtcttctaactcccaaactggggctcttttctcagggccaggctattccccaggaaggcctgggaaggaagagggtcagggggcctcaagcaaggttgacactcctcttatccctgctctagaactcctgtcctcccacctcggagctcctgggtacatctgaccgcctcttctgggaacccatgaaggttcacgacatccgctggaactttgagaagttcctggtggggccagatggtatacccatcatgcgctggcaccaccggaccacggtcagcaacgtcaagatggacatcctgtcctacatgaggcggcaggcagccctgggggtcaagaggaagtaactgaaggccgtctcatcccatgtccaccatgtaggggagggactttgttcaggaagaaatccgtgtctccaaccacactatctacccatcacagacccctttcctatcactcaaggccccagcctggcacaaatggatgcatacagttctgtgtactgccaggcatgtgggtgtgggtgcatgtgggtgtttacacacatgcctacaggtatgcgtgattgtgtgtgtgtgcatgggtgtacagccacgtgtctacctatgtgtctttctgggaatgtgtaccatctgtgtgcctgcagctgtgtagtgctggacagtgacaaccctttctctccagttctccactccaatgataatagttcacttacacctaaacccaaaggaaaaaccagctctaggtccaattgttctgctctaactgatacctcaaccttggggccagcatctcccactgcctccaaatattagtaactatgactgacgtccccagaagtttctgggtctaccacactccccaaccccccactcctacttcctgaagggccctcccaaggctacatccccaccccacagttctccctgagagagatcaacctccctgagatcaaccaaggcagatgtgacagcaagggccacggaccccatggcaggggtggcgtcttcatgagggaggggcccaaagcccttgtgggcggacctcccctgagcctgtctgaggggccagcccttagtgcattcaggctaaggcccctgggcagggatgccacccctgctccttcggaggacgtgccctcacccctcactggtccactggcttgagactcaccccgtctgcccagtaaaagcctttctgcagc

SEQ ID NO: 130 - DNA, 2080 bp, Homo sapiens
ggaaaatggagataaactcagctcatcgtcttgtgatgcccgaaattatgcactacctagtgcatagtaggtgcttaataaacacgagtcctttccttcaaaggatctgggcttagagcccagtggagactgccatgggctggggacagtggcatgtgcctgggaagccttggcatcactcaggcccagaagacaccagtgctctgaatgacacctgcataggggtggagacactctgccttgggagggggctctataccacacatggctggactggggtctgtgtgtgccagtctggatacacaggtggccgactcagctgcttctggcggggagattggtttctgcctcctcctgcctcttttccaactctttaatagagagaggacataatggagtgttcagagaggcctctccccaagacaccataaactgcaggtcaggagccaaggtcaggtgctcccaccctgcctccaggagaaagactttccccaaaaggtcctgtcattcctcagcccttctccaaggtattactgaacagaggctgaaaagggttgtcttttggaaagagtggtcacacatcccacggactggagggaatgtgtccaccctcccacccccaactcccatccacggacaggctagggaagacagaatctcaaccctggtcctaggggctgccccaggagtctagatccaaccgcttcacttcctcaggaggctagacctgccactggggggctgtggggtgaacatggggttcaggctgggtaccccatccagtgagaccacgaatctgagcatggcaactgccccctcagctcctgcgaggtggagacatcacgcactggctgggtataagctcagcgatctggcgagggtggaaggagggaggaagaagggcccaccccctgctggctccccctccccctgggactccccctccctttccaggcggggatataagccccacaaggaaagcgctgagcagaggaggcctcagcttgacctgcggcagtgcagcccttgggacttccctcgccttccacctcctgctcgtctgcttcacaagctatcgctgtgagtggctgggggctcaagcctggggaaacccaggctgttttgtggggaaactgaggctgggatggtggaagctgggggtgagtggtaggaaactggattggagggggccatcggaggtgggaaggaggccagcagcgggggtgggggtggggaggcaggcagggcttatgctcctctgacatgaggaaactgagtcaggagacggtgcagtgcccaagaacacacagcaagcccggtggctgagccttggtccggtaccagccccagggagagcgtcggagcgcggccccgacggcagccgcagcctcccgccgtgtagggtcgaggcttggaatgacccacgtcccaatgtcgccttcccagatggtgttcgtgcgcaggccgtggcccgccttgaccacagtgcttctggccctgctcgtctgcctaggggcgctggtcgacgcctaccccatcaaacccgaggctccccgcgaagacgcctcgccggaggagctgaaccgctactacgcctccctgcgccactacctcaacctggtcacccggcagcggtgagcgcaggcgcggagcgggacccctggggctctcaccctgcggccccgctccacctgggggcgtggccagatctgaccacgctcttcccttccccgcccccaggtatgggaaaagagacggcccggacacgcttctttccaaaacgttcttccccgacggcgaggaccgccccgtcaggtcgcggtaaaagcgcccgttaccacacatcctgcatccgagagcgcggcctggccctaccctggcaacatcacttaacgacgtctcccaggctcgcctccccagatccaattccttccccttcgcttccgcaggtcggagggcccagacctgtggtgaggacccctgaggcctcctgggagatctgccaaccacgcccacgtcatttgcatacgcactcccgaccccagaaacccggattctgcctcccgacggcggcgtctgg

SEQ ID NO: 131 - DNA, 2734 bp, Homo sapiens
ttttcttttgagtctcactctgtcacccaggctggagtgcagtggtgcgatctcagctcactgcaatctctgcctcccggattcaagcaattctctgcctcagcctcccaagtagctgggattacagacgcccgccaccacgcccaactaattttttttgtatttttagtagagacggggtttcgccatgttggccaggctggtcttgaactcctaacctcgtgatccacccacctcggccttccaaagtgctaggattacaggcgtgagccaccacgcccagccgggaatgatttttaatcattctactatttggtgtttaatatgttttctcactaaatctgttcaacaaacctgagaggcaaatactgttatttatttatgaggagagaggttcagaagggtaaagttacctgctcaaggtcacagctggaaagaggtgaagccttcagcaaaaaaagcaaaacaactcatttcattttattccgtgagctgataatggaggaaaaagtatttggcaagaagcggcagggaggggaacctggaggaactccctgctcttgaagaatgcaagggaggctgggaccttgtcactgaggagcccctggcatccttccagagatgcaaccaaaggggtgaccccagtgtgttcttaataggagccgggaaccccttctctgtgcacctcccacctcttgcccctgggaagtccttccctgactctaacctcagttctgatgctgttcccaccctctcagctctcaagcagatcaatgcaatgccacctggccgcttgctttgcccactgggcctacagccggaagcctgcccttcagccctcgggcctgatcccaggccgcctgcagcctgtaaccagacactgtttgcttccagcaggcaccccccgagcccagctccacacaccgttcctggatctcctctccccaggcggagcgtgcccctgcccagtccagtgaccttcgcctgttggagccctggttaatttttgcccagtctgcctgttgtggggctcctcccctttggggatataagcccggcctggggctgctccgttctctgcctggcctgaggctccctgagccgcctccccaccatcaccatggccaagggcttctatatttccaagtccctgggcatcctggggatcctcctgggcgtggcagccgtgtgcacaatcatcgcactgtcagtggtgtactcccaggagaagaacaagaacgccaacagctcccccgtggcctccaccaccccgtccgcctcagccaccaccaaccccgcctcggccaccaccttggaccaaagtaaagcgtggaatcgttaccgcctccccaacacgctgaaacccgattcctaccgggtgacgctgagaccgtacctcacccccaatgacaggggcctgtacgtttttaagggctccagcaccgtccgtttcacctgcaaggaggccactgacgtcatcatcatccacagcaagaagctcaactacaccctcagccaggggcacagggtggtcctgcgtggtgtgggaggctcccagccccccgacattgacaagactgagctggtggagcccaccgagtacctggtggtgcacctcaagggctccctggtgaaggacagccagtatgagatggacagcgagttcgagggggagttggcagatgacctggcgggcttctaccgcagcgagtacatggagggcaatgtcagaaagtgagttccggctgggctgcccggtggggtggatccgaggtgctgaggcaaggctggattctgagggccaaggaaggacttagcttgcaggcctttgaaccctgtggagcccgagactggcccattgcttcacctccagctgctggcaaagcagctgcaaatgcaccgaactgggagggcttccccacccctcaccagggagctggggatgagggacagagcgtcccttggacagacaggaaaaccgaggctcagaggagagaaactcacccgaggtccctgagagcctgctggcaccccgaatccagaaggagccccaacccccacgagtcagctggcctggcagggctccggaggctcccggcgaggcgggggtgggagcaggagcaggggttaggctggggcagccttccatgtacccctttccctgcatgcctggtagcatcctcagagcccctcccacacccccagctctggcacaccctctaaccttcctgttggggcagggtggtggccactacacagatgcaggctgcagatgcccggaagtccttcccatgcttcgatgagccggccatgaaggccgagttcaacatcacgcttatccaccccaaggacctgacagccctgtccaacatgcttcccaaaggtgagtgggccctgcctgcggccacagggccagggggcaggcaccctgggctggggtgtggggcaggagggtacgtcctcacacacacatgctccctgcccaggtcccagcaccccacttccagaagaccccaactggaatgtcactgagttccacaccacgcccaagatgtccacgtacttgctggccttcattgtcagtgagttcgactacgtggagaagcaggcatccaatggtgtcttggtatgaggctgggcccatctctccttcacgtgggctggccccggcttgaggggtcttcccgttctcttcatccctgtgccagtttctgaattgttaggccagggttgg

SEQ ID NO: 132 - DNA, 2097 bp, Homo sapiens
tggagagggctggtgttttggctgagacctgagagaccagaagaaatctgatggccagaaccaatgtttaggtccctaaagagaacaagcgtggcgagcaaagggggccagtatgggtggagatcagcgagggaggggggcagagatgagtgcccgaagcacacagtaccttggcatagggagggtttgattttacctacaaatgccattaaacccactaaggattttaacaaaaactacaattacattttaatttacattttatgttttatagagacaaggttcggctatactgcccaggttgatctcgaacccctgggttcaagcgatcctccctactcggtcccccaaagtgctgggattacaagcgtgagccgctgcgcccggccttttaatttacattttagccttccggttactggaatctttgatggggaatgagttatagtgaggcaagagcctctaacattctaggagctcttttcccgttcggggcctcaatttcccgttctacaaaggcgggtgggagggaacggggtcccaagtagtactggataaagaggtggccgatcgcaaacgctgagcacttcaaaactctgggcagagcgcttccgcgcctctcctgctatttcaccctggccacaggctagccgccgaggccggtcatccgctctctccgcggaggagtcaacgccacggaagcagcggcggaacctctctaagaatccttccagcttgtgctcttctgtccagggcagccaatcgcgaggaggagagtagtcagagggcggcaccctccccggtctgggccgagttattggctggtggtagcgtcgctcgcccggcagtaccacgtgacggcctcggccgcgggcgtttacactggctctgcctccggcatctcttcgccggtgcgtcctcgccgcgcccgtaggtcccggcagccgggccccgcctccttcggagtccgagcgatgggcggggaaagggacaggcaggtatagctctgtcggcgccgcggtgtccacctcagtcaggccacggtggaagacgcgtgccgcggcgcctggttgcctgcagcggcccggacccgagaggtgagaagagggaagcggaccagggaagagggagggagcggtgctggccgccaagcggtcagcgggcccctcccagagtcattctgcctgggtccccgcgcggtagaatcccagatcaggggtcgccgccgtggagcggggcgtgcgtcaggttatttcccgggtggtccggggccgggcgagtggcactgcaccctggtgatccgggcctgcccgtctggctggcggctgcccacccgccctccatcccgcgtatctcgccgtatctcgccgggtgccacgcactccgctgcttttccagtcctcgttgatccgtctcgaacctagatatctggaatagggatcgaggagataggagccaccaccacctcggacagatggggaaactgaggccggcacaggcgagacggcttggttatcttggttattaaaaatcacacacccgattaagtacaaaatcaggacctgttctttcggactcacacactaagttggtattatttcactggatggatggaaacactgagaagacagagagggcccagagccttgcctaaaaatacacagcaagtcttttgcagagctaggacttgtacccagctctccaaactcatagactatcagcctgggctccttccttgcacagattggggatcacagtgagttagaaacattcagaacttaaattgccttccggcgcccattctagttaacctgtcttttctccttgtccccaacagttctttatgtgaaatctacaactaatgtgatatgcaatactagattaagcagaactttttgtttttgaaaattgaatcaataagaaatggagggccaaagctgtgggaaaggaatggaccctttaaaatcaggaatctcaaggcaggatatagcaagggacagagactaatagctgtcgtttattgagtaaatgctatgtgccaggcactgtggtaggtagttgtgttagccttacaaaccagcaagttaggtaatgtta

SEQ ID NO: 133 - DNA, 1600 bp, Homo sapiens
ctggtgtagactcaatgtcatgcaatagtcaggtatactgaagagaaacaactgcatgtcttgttttttaattttattattttagagatgctgacttgctatgtggactaggcagaactcgaactcctgggctcaggtgatcctcccgcctcagcctcctaagtagctgggactacagcttcccgcgacctcacccatcttgctttttaatttaaagcagagtctgcatatcatctgaagtcatctctctttggggacatcccacaggtccagaactgccagacggtagtggggtggccggctaggctgtggggagcatggagatttatctgcaaaggaggacctggacaaatgttcccccacatcctctcaggcgaagagaatggacgggagagagaggccgaccagtgttccccgtgttgctgtgtacggaggagccagtccgagggaccgcggtgtggacagggacaggcaaggcggggaaggaggagaaacgaaagccacattggtggcgggtgctctgcacacgactcgctccctaccacacgccccccgctccgcacacgaccgatccggggactggagcaggagggctgcaccgggactccgggacaggcccagttgaaaacggcggggcgagggggtggggtggagacgcccgcgacgccaaggctggggtcccggaaagcgcggggaggagggtggaaggcaaaggcaacttcggggaaactgggaaaggcggccgggacctcggggacactgcgtaccacccggcgcacagcccctcccgcgcaaacccgagccaaaggggcggtcgagcggcgcactcggagcggagctcaggggatggtgcgcccggcacttatgctgggctcagcccagcccagcccaggaccgctggcggtgcgaacccagccgggcgggtgcaagcgcggggcagggcctctgcgcccggccccctcccctgagtagaaaagcagccgcaggctgtggcgctccaccacgccgtccgggtgggcctagcagtcgctccatttatcgcttgagatctccagccttaccgcggctcgaaatggaccccaactgctcctgcaccactggtaagagaagccgaccctgcgccctaggaatcccatttcccagccccagtactgagggtctctgggtttgaggaggtcgcatttaagttctgagcggaagggaattcctttacttccttaggtgctttcttcctgatctcccctctgagagcactgccctccctcctgggcctctgggtcagagttaaggatactgagggtcaaggcagtcccgctccacatcacccagttggttagggtcctgctggctgggccccagtgttctcctccaggctctgagcaatcagggtggactgggggctggagacatttgagtcttcagggttcagcacagaaggttctggctggcaatctcagtattcctgggttgggtgtgcccctgggaccttcctggtagggtaaaacaggagggtgcttgcccttcccagcgttagtggagaggacaggggctttccctgagtgggaaaggagctctgagggctggccctgcacaaaggagg

SEQ ID NO: 134 - DNA, 1858 bp, Homo sapiens
gcattatttttgttcagcactttagggattctagattatttttacacacattaactcatctaatcccacaatgacccccagagctcagtatcattttccatttgcattttacaatgtagtgaattgggtagaagtgagacagcaaccagctctcagttacacagacagataatgaaaatagtttactttttgctcaatatgagtttagcaaaggctttcacgtaaaccgtttcactccaaccttatggggtatataaaatcaggcactttacactcattttctcttttcatcctcatgcaacgctgggcactaaatatcgtatgctgtcattttattgatgaggaaactgacgctcgaagtagttaaatcctttgccaaagatcacacagctgcagcctgccccttattaagtgcacacttcgtgatgccatgcaccctgttcagtaatttacaggcgttattatctccccaacagtcacagaatatcggtattcttattatcccatttactgatgagaaaagtgggttcagagagggtgagtgactggtccaagaccacacagccagcaggtggctgaggcaggactcaaagggctagcaaaggagcaagtctggaactcaaacccagttctgactccagctctgtgctgcttctctcgcaccccgaccctgggtgggggcctcgctccccacccagctgaaacaatcaacgaccctctggtagaccaggacctctcttcatcgaagtcttaggtagccacgcttgccaggagaaggcctttcttccttcaccctccctggacagatccgggtcaactggaggtggcgggcgagaggaccgatccgcagggcggtggcgggcgcagggcgaggctgtgcagcgaacggaagaggctccgggaccgcctcgcgttccagcagcggcgcggggtgggtggggcgggagtgccgggcctccgccccctccgcctgcctttccttcctccctccctcggtccccggggccggcggacccgcgggcaggcactgcccgggctggacgacgtctggccggctcccggcgaagggcagcggaggagcggcccagagcgcgcagctagggcactggcgaaaccccgggacagtccctctccgtgcgggggcggcgcagagcagtcccatccccggggtcccgggcgcggctgactgccggctggttccctgcgcgcagtagctccccgagccgggctgcaccggaggcggcgagatggtcgcgcgcgtcggcctcctgctgcgcgccctgcagctgctactgtggggccacctggacgcccagcccgcggagcgcggaggccaggagctgcgcaaggaggcggaggtacgccgtgtgtacctggcggagagcggtgcgtgtgcttgagacctgtcagaactcggcagtcaggccacccggcagtcccctgtgagcagacaatctgcgttaccctacccctgtcctccgcccccttcgcacttgaacataaagagccgggcagttttttccccgtgccaggctggaaccacacaggcacgcggatccgcactgatgggctggggtgggtgcagagacgagaccggacagacgggcaagagcccagaggggacatcctaccctagtttggcacggggccactctccctcaccacctaggctggggagaatgaggttcattcgtcggatgcccccgaaccgtgtggaagcctcagtttggtgctgtggagagggtaccgctggctggccgggacgcgggacacagcgctggcttcctggccggggaccgccgctgacctgcttgggcaagccatttaaactgctcagaactagtttttctgtctgtaa

SEQ ID NO: 135 - DNA, 1725 bp, Homo sapiens
ccagcctgggctacagagcaggactccgtctcaaacacaacaaaacagaaaaaaactctttgctcaatactcctatggacttaatagcaatgattgctgctaatgtgattctaatactttttgggcatgccatcattgtttaatttcagagcaaactttctggaactgataaataataagctctccttaagaaattaaagtgcattaaaataaattgctttcaggggttcttaaacaagttcaagacatccaggagtgtgatacatttgagcgagaaatagctggcctagttcactctccacattaatcagaacgtctcccaccttctttttagggataagcactctcaaatatcattattcataaactaggggagggccgggtttccactcgcatcagttactttctctcccctgagaatatcttgcagccgctggaattttgggcccctttgctaggaggcaattaacaaattgcacttttactatcaaagctgagagtggcccagcagtggccctggccctgccggcacgcttccgatgcgtcgccctggcctgaagatcgccacagtcgggttcgcgccccgtggtcccctaaggcttccagggcgctggagctggtgcacaggacctgctcctccagggtccccatctgggtctccagcggtccttcctctctgccttctcctcgcagagcaccccgtgggcctagtctaaacgagggcaccactggtccggagttgcacttgttcgctccctcctgggctctggcagcgctgcatccccggggttgcttcgggttcgggcccaatagcagagtcagagccgagacgcatgtcccctgcaccggccaagggtgccgctggggctcgcgccaaggaggcaaaggcggggaccagaggcgccggaggcggcgcaacgcgcacaggtggcgcccggcctggccaggctctggcaggcgaggctgggtgtggtcgtgaaggggcgggcggaccggccccacactgcctcggttcggcaagtgggtcagttggctggggctcacttggcaacgggacgcgggaacgaggggcgcggacgcaggcccgggaggacgcggcggcgggaacctgggggcgcagggctagggcagcgggcccgacccgcacggctttcctggaaagcgctgcccctcgccgcggcgatgccctcgctgtggagagaaatcctcttggagtcgctgctgggtaagccgaagcccctcgccgcgagttcgcgggtgccagctccccgggccatgtccagagccgtggagccaggccaggttggctgagttcaggtaggaggaaaagggcgctccgtgcccagagtggagatgcttatcgtcccctgggaacttttcctactgaagggaataaaggaaaagacctagattgaagtcttcaagctgagtctgcgaggcgcccgcgagagaccccgtcgcccgagttcccagcagccctgggattgtgcccaaggagcgcgaattctcctcgtgtcggccttgaccccgcgcggccggtaccgtccccaaagccccccacccgtggcctttaagtttaacttaatacagttcagtgctgaactttaaaattcagaaggaaaggggcacccgttttccccaggagctgtaggtggacactgggcggcagctgctgccgtgggctgggcccaggacaagtggccttggtgtcggctgcacacttgg

SEQ ID NO: 136 - DNA, 2065 bp, Homo sapiens; identical to SEQ ID NO: 28

SEQ ID NO: 137 - DNA, 1629 bp, Homo sapiens
cagcacccagacacttaacagatggaaagcggtggcttggaactcacttccaacgaaacaatagcacatgctccggctggctttgacacttgcttccaaaggcgacctgcacccagggccaggaccacggcatctgagcctcctcccccagccgccaaccccattcccaatggaggagcccaggagaactgggggcggccaaggcagcccttccctgctccgcagatccagaggatgcccacagcccccttcccctcccgcctttcccacactccctgtagcaattcacacaagcggggaggggacgaaactgctgaatccagcagatagcttgtggcggggtaatcctcggtccggccccatacaggacagaaataaaatcgccatttcagctccgggcgcagctggaggaggctgacgccccctagttaggggaaggctgtgggtgaccgagaaggaacttttcccgttttctattcaaatgaaatgagggtggcggtcgcagcagggagagaggagcgaggggagttttcccggcggggctggggggtccacagcggcgcggccacgctcagcccagcgctggcttaggagggacgggctgcgtggggaggcgacggctccgggccgaaggggtcgctcagggctctgcacagctgtccagggggcatcgggagataggcagccgaccgggggctggagtcaagggaagaagaaagagggggaagggaggtgcagggagtgaagaggaggggagagaggagagacgggggagggaggggggaggggggagggggaggggcgggcgggcggccgggaggaggagcgcgcgagccggagtcggagcccgagcccgagcgcgagccgagcggaggagaccctgcggcgcgcggcggcggctcccgggcgtcccgggcccggtggcggcgcggctgtggttggctgagcgccgcgggccgccccccgcccgccccctcccctgctcccctcccccgcctcccgcggcggctggcgtcgggaaagtacagtaaaaagtccgagtgcagccgccgggcgcaggatgggatccggctcctccagctaccggcccaaggccatctacctggacatcgatggacgcattcagaaggtagcccctcccccacccagacaccccctcctccccccgggtgacagcgccggggccgggcgcggcggggcgggactgtccgtgcgtctgccggtccaggctgcggcctccgtgcgctccgccagctctggtcgggggcgggggtccccacgcgccggctccccggggaaaggggcgactcgccctggggggtggggggtgggggggcgggctagtgtttccgtttcacaggcagagcttttctttttgaaaatctgattaggctgagtttttacattcaagggctggcacatgaagcctttaatttccggtggatcggcccgccgggcagccccggggtcgtggtccgcggagggggcgagcagccgccgcttcctgtcgcgcgggggcaggtgcggggggcgccggcggggacactgctcccccgcaggtgagtagctccgactgcagagggggactcgggccgctgcacctccggggccccgcggagagcctggggg

SEQ ID NO: 138 - DNA, 1605 bp, Homo sapiens
accccatgtgggacacagaggacctgcagtagcaggagggcacagctaagagaggagacaagaggcagcttgggggcatgggggggaccccatttccccaaatgttggagccgcccttaagggaacttcccctggactcctctggaggtcttgccagatgggagaaccaggggtccattcagaccccagtctcttctcttcccatctcatctctccacctggggggctcaaagaacctagctcctcccctttgaccccatcagcttctccctcaccgaatcctcttacaatccatttcttaattctgccccatcaaccctccctggtcatcacataaacaccagcaagggcagtagtttagggacagctttgctctgtattcgaagaaaggtctttggtctgcttagaaattaagtttggagcagcctgggaggaaatagaagagatgagacccagagaatcaatggccactgccaaagagagataggagagcctttctgcggccactgattcaacaaacggcatcacacgcccctcagcctctcatctcttcgaggccatctccacccccacccccacccccaccccaaggccattccaaggtcccattcaagaccactgcgcaggggtggcgccagaatgatcaaagtcatcatggggcactcatctttgtgtgggtcaagcactttgtggtgtcgtgtccctgttcccaaaccagggaccaggagtaggatgggggaggggcagggcgccgctgctgagtggagaggacgcggagtgggtgagggggccttgcgcacagggcaagaggtggccaggcagggcgggggaccggggagagcggaggatttcagatgagggacaggggaaggtggagaggggagggcaggccccgccagggggaggagccgcctcccgcgtccagctgtcggggctccctcccgtcgcggctccgctataaaacccaggccggcaggatcgctgcacccgcggcggcctcctcggtgcgcgacccccggctcagaggactctttgctgtcccgcaagatgcggatgctgctggcgctcctggccctctccgcggcgcggccatcggccagtgcaggtgagctcccgggctccggccccaggtgcccctcggcggtcccctccgtgcccccagctcccgcccctgcagaggatccccccgcgggcgaccggtgagcgtcggtggcgctggggtcccgggttgcgtgtgcgccgggggccgcgagggtgcgggaggactgggcagcgcgcgagcttgtgtgtgcacacgcgtgtcagcaccggctgggggagcgtgtgcacgggtgtgcgcggtgagggtgtgtgcgcgtggcccggcgagacgagttgggagtccctgataaggatgcgtctcaggccgggcgcgggtgctccagcctgaaatgccagcacgttgggaggcagaggcgggtggatcacctgagcccaggagttcgagaccagcatggccaacatggtgaaatcccatctctaccaaaaatacaaacattagccggacgtggtggcacacgcctgtaatcccagctactcgggaggctgaggcccgagaatcgcttg

SEQ ID NO: 139 - DNA, 1744 bp, Homo sapiens
cttgaactcccaggctcaagcaatccatccaccttggcctctcaaagagctggaattacagatgtgaagcactgcccctcccccaaccccatctgttatgaaaggagggtcctttgaccacaagtgccctgagaagtcaggaggacttcccagtctcagacatttttatctgagctggagatggggacagcctcccacacacaggacttggaaggctatgaaggaagtagggggctctcttgggaggtcatttcccttggtagggacggttgtgtgaatgaacttggcctttagggagaggagcccgactctcacctgaagccacccaacctgtgcagatggctgaggaagccctggacaccacaggaccgctaacccaggatctttgttgactttgctcccaggccactgccccacacgcaggctctgaactcctgggagaggtagggagccagcccgaggcgtgagtcaagagtgtaaagtacaccgagttccttggcaagcaggctcttcaaggggaaggtgtcactcggggaacaatgagaaatgtgtctttccctcagcccctgatagaaaagataacaccccttgagcacagccttttctcatctgttcttgctcttggatggggggctgctactccggagcggcgaactggcgggcgggggtgcgcctgtgagtgtgagcgcgcgtgtgcgtgtgtgcgcgcgctctcgtggccttccggcagctggcagctgtcccggcccccaccccaccctaccccaccccacccagccgcgccacgccacgccgcccccgcccctcgctgtcctgggtgcgcctcgggccgctgcgctcctggccagctccccccagcgcctgggaggcgacccccagtgcgcccgggttcaaaggcccggcgaggcagttccagcccctctggggggcggggaggcgacgggggtggtgcagaagccagaaaagcccgagccacagccggccagctccgcgcagggatgggcagcgcgctctgaaagtttatgaccgccgcagccaactcctggccggagctggagacgcagcgagcgatcggccggcctcgaacccccacagctggagggcgaggccagctgtacccggccccagtgccctttcgcggccacaagcggccgtcctcctggtccggtgctccggcgcctgatctaggttcatggagccggggctgtggctccttttcgggctcacagtgacctccgccgcaggtaagcgcacggggcggcgcgcctctcctggcgcgagcgcacacaaaaggacccagggcgggggacccgaggcgcggagaagatgtgcgtcgcggggagcaaactcttgcctgggctctgcactcgtgaagacgcctgggggagggctggggagcagaagcggcgcgcaacgactacccgcacgggctccgggagttgcagcccgcgcactggctggagacctgctgcctgggccgacttggtcaatttttcatgaaactggggacttttcagaaagtttgcgaactattcagaggctgtgccaaaccctggcaaagtttgcagaaagtatgcaaaatgcatgcaagttttcaacgggtgcagatagcttgcaagcttttcacagagtgtgcagatagcttggaaacttttcagaaactgcgcagagctttggaaactttgcagacattttgcttgctccacccccctcctcaggtgtttgggggtggcgggtgttgagg

SEQ ID NO: 140 - DNA, 1633 bp, Homo sapiens
gatttttcagccttgcttggttttggccaaaagcacaaaaaaggcgttttcggaagcgacccgaccgtgcacaagggccatttgtttgttttgggactcggggcaggaaatcttgcccggcctgagtcacggcggctccttcaaggaaacgtcagtgctcgccggtcgctctcgtctgccgcgcgccccgccgcccgctgcccatgggggagatgcagggcgcgctggccagagcccggctcgagtccctgctgcggccccgccacaaaaagagggccgaggcgcagaaaaggagcgagtccttcctgctgagcggactgggtaagcgccgccgccggccccgctgggggcttggctcacttccccagagcggcttggaggcaggggccggctttcgtcggagttctcggggccggggtcccggcggcgggaacgggaggacctggcgggcgaggtcgcgcgcgcaggcctgcgccccagggataaaccccggagggtggcgcgcaccgccggctcgggttggggaggagggtgggagtccggccgcaggacggcgcctggccggggagagggtatctgcagggacagtgagcgaagccaccgtggccgccgcgcacccgccgggaagcgcttcggcgctgcgaacccggctttctccggcggcggaataaatgagagaggtggaaaactaccccgggctctccggccctccccgcgccctccgccggcgcgttctctctctcctgccccaggagccgatggagactgataacggccctgcgccaggccgtccccgggcggtcctcgcgcccccgcccggggctcgccctctcaatggggacagaaccgcccgccgcaggcagcgtagccgccagcaaaccgcgaggcggccggggcggggcgaggggcgaggcgaagggcggggccacttctcactgtcgcgcaggccccgcccccgcggcggtgccttttttataaggccgagcgcgcggcctggcgcagcatacgccgagccggtctttgagcgctaacgtctttctgtctccccgcggtggtgatgacggtgaaaactgaggctgctaagggcaccctcacttactccaggatgaggggcatggtggcaattctcatcggtgagtgcaggaatcttgcgggacttctgctccaggagacgcaaagtggaaattttttgaaagtcccggatcagattagtgtgtgtggcgccggacgttatgaagccgtctaaacgtttctttatttctcctccttcatccacagctttcatgaagcagaggaggatgggtctgaacgactttattcagaagattgccaataactcctatgcatgcaaacagtaagtttgaccggatttgaggaaataactagtatagtttgaatttgccagcggtaaacattctcatcacggcgtttatcgggaaggcgaagacttcttctggggtggggatctcatttctccttaaattctaatatatttgacacattttaaacattaaagttaatttgctgatttggcttgaactggagatgtaagataaatggttcgtgttggccgaattcacggcctttctccatgagcaacaatccttatttctgtatttaatggggtttatta

SEQ ID NO: 141 - DNA, 1602 bp, Homo sapiens
attaaaaaaaaaaaaaaaaaaaaaaagccaaccacttacgtttacagaattaaaattgcagcctgccgctgacaacctgagaaaaagagacaaagtcagtggaatagcccttgttatttatgcaagtccgcatacagctagccctggagttcctggagagcaaggaacctctgtcccaaacttgactcagagcttccaaagttggtgtatttcaacaagtaagcattccattgagccaacaatttggtaggctaccagcggctctggagcgcctgttgatgatgacagtttttgtgggggcatctcaatatgacacacaattgacactgaccagaaacacagcgccaaggacactctagtcctagccatgaaatgttatgattccaggttttcaggacagagcagagtccacttctcatctccagtatccgtaaaaatttgtccaaaatgtaactaagaaaacacaatgatattagttacttctgctccccgtcaccctcaaccccactgattacgagatgggaactcacacaaaactttgagacaaaagagcaacaagtttgctttattgtttgcttgttttgttccggagtcggggccgggagggagtgcaggaggagggatccaagcttccaagcctctgctccgctctccttctatccagttggtctttagggcactgaaggaaactcttcttcagaaataaccttttaacttttcttctgtcagctgcctgccaatcacggagccagaggctgaggggaggctttgagccggtctgcgagtccggaaggcaaagatcgcgaagcttggcgctccagaacgctcagggggcaggtgacacagtcgtgggttccccggcgggcgctggcttgacagtttcctccccgcccactggcaggggagcgccccgccgggctgcacgcgcgcgcgcgcaggggggcataaaagccgcggccgcgcggagacgcggagctcgcccaccgcccgccccagcagtggctgcaccatgcacgtgaacggcaaagtggcgctggtgaccggcgcggctcagggcataggcagagcctttgcagaggcgctgctgcttaagggcgccaaggtaagcccggcgcccagccgcggaaatttctctgcccacacactccgagactcgccccgccgcccgaggtgcactggcggagacagggaggccgcgcccggcgtgcccactttgccacttccaaaatttgctgaagctgaggctgtgagcacacctcagaagtggctgggagggaacccaaacctaattgccaaatttcaggtccaggaggggagcctcttgtgtgtttattgtttgtccgtctatttcgtgagctgcgcaggcccgcgattcctctcctcttgtctataggtagcgctggtggattggaatcttgaagcaggtgtacagtgtaaagctgccctggatgagcagtttgaacctcagaagactctgttcatccagtgcgatgtggctgaccagcaacaactgagaggtaagacaggggaatcaatctgtcaactgggaacgtgctctcaacaagcaacaacctgaaggcagcccggccagggggccctggg

SEQ ID NO: 142 - DNA, 1564 bp, Homo sapiens
tagagcccgtggggccccggtgaaaggctgtggctctgggtgactggtgtgtgtgtgtgtgtgtgtgtgtatcagagtgggtggcggcgtctctgctcggcagtggcgcgtgtggcccgccccgcgcgcgtgttctcgcgggccggggcagggcgtgggccccctccggcggagccgcgacccctcccccgggcggcgggaggtgcgcaccggcgcctctaggacccggcggcggccggccgctgtccccgggccgcgcgagtgagcatgtgcagagcccggcgcccgctcgcccgcccgctgcccgccccggctccgcgcccgcccgcccgccccgccgttcagcccggacgccagcagccccggggagccaggcggcggcgccctgtgcccgggcgcgtgggtccgcttgccgcgggcggccggagacgtgcgggcgccggggcttctgggctccgggcactgcggggggctgcgggctcggcgcccggggaaggcgggccatgggcgcgggtgcgggcgccccagccggccgcgatcgcggggtgagtcctgtctctcggcgctccagccggacccccgcgcgggctgcgagcagggtgttccccttgccgcgggcaaacaagtttgtgcagacgcggttgggagcgcggcggggctgcacctgctccggctgcagggcgggcttgccgggggcaccttcccgggggcccggggcggctcggccggggcaggggagagtgagcgggtgcgtgcaggggttgtgggggggcgggggcggcgctcggcgcggccgggatggggtgggggtgcgcgaggcgccgcacgagccgcgtccccctccggagtcctgagagcccgtccgtcacccgggagggcgctgcggttggtcccggggagggggcgagggcagggtgtggggtgcgcacagcttccctcctaggcggcgacgtttacccagaagcagctccctctcgttccgctaccaagagaggcttccggtcagcggagggtttgctccgtctcttggtgaacttgaacagaggcagaggcaaaagcaaaacgtatgtattttgtccagaaaattacctagtgtagagctttgcgtcttcgtaggtgtggacggagactcacgactgaaggttgctaaattgcgtttttcttggctactcaggagcgtacgtacctggctgggtcccctgcctccgggtaacctcgctggtggttttcctgagcatttgtgcgcctgggatgatgcctgctctgctgatcgggaatgcgggtggggaaggggaccgctcttccttccgctgagcagtgggaaggctcatataggagttctagcctcatagccctgcactgggatccagctgctccccacactggccctgcccctgcagctcccaagatggacagatgcaggactccgctgtacttttctaacatgagatacccgcatccctcttgttgctggaacagcatgcttaggtttatggaggcacttggtttatcccactttggcatcaggagtgggggcctttcttttttcctctgatttgcctag

SEQ ID NO: 143 - DNA, 1644 bp, Homo sapiens
taatatgggttcatgcctagtatttccctttacaattgttgtaaaggttcaaacaatgaaaatgattaaaaggagactggcacagactcaaccttaagcaattgctagtaatattgaagggaattaaccacttgtctttcttacttcttatgttaagtttttctttttctttttcttttctttcttttcttttcttttttttttttttttttttttttttttttttttgagagggagtttcactcttgttgcccaggatggagtgcaaaaatggtgcgatctcggctcaccgcaaactccgccttcagtgatctcgcttctgggggcatcccatattttccaaactgccatcctatagtggggtgcccgtcgaggctgtggggagaccccggagagatttatgcaaaggaggacccagacaaatgtgcccattcagcctctcaagagtgaagaatggaagagaggggggcagagccctgtgtcttccgtgttgctgtgcgcaggagaaacatggccaaaggactgaggtggggtgacagggacaggcaatgctagagatccgaaggtcacatcctcggcctgtcctttgcacactactcccttgctaggctccctgctcccgccaatctagacagtggcgcaagagactggggttgcactgggactccaggaaaggcttagctgttgacgaaggaccggggcggggccggggggcggggcgaaggccaggatctccaggtacccggaaccccaaggggcgggtgtagcaggcaatcttggcgaaactgggaagggcgggcaggagggcagggaagccgctcacccaggcacaaagcgcctcccgcttgagcggactccaaagggacggtccgcggtgtgcagcgagctgcgctcaggggaccttgcgcccggcccttctgctgcacacagcccacccaggacctcccgcagcgctgacaggcggggcgggtgcaaagacggggcggggtctctgcgcccggccccctcccctgactatcaaagcagcggccggctgttggggtccaccacgccttccacctgccccactgcttcttcgcttctctcttggaaagtccagtctctcctcggcttgcaatggaccccaactgctcctgcgccgctggtaaggaacgccgggttccgtgcctggggatgctcgattcccagacaccatagagagtgttcctgggtttgagaaggtcgtattttgagatctcaactgtaggggactccttgacttagtccagtgctttcctcttggccaagatcctgagagcatttccttcctctctgtgcctctgtgtcagcgttgagggtactgaggctcaaggctgtcctgctccacgtcatgcggtttgtcccagggctgttggctgagccccagtgctctgaccaggctttgagcagcaggattagataggaggcaggggacattgcctcttcggggttcaggacagaaagtcgaagtcgccgtcttcccaggctgtgcctggagcctgggactttcctttggagtgcaaacaggaggctgcttggccttcccagcatgaagggagaggacatggggcttctcttcctctgctctgagtgggaaaggagctctgagggctggccccgcacaga

SEQ ID NO: 144 - DNA, 1759 bp, Homo sapiens
ggagcccaaagagctggagcatcaggggccccagaaataagggaagccaaccaggaaactgaccttttacacaaaatatccaggttttgagaatgctcaggaagaggtgagagctgttctcaaattcagatgggctgccagtggcaagaaggtgatgctaaggggttgcactagggctaatgggtaggtgttgcaaggactcctattttggcggatgtaataagaactggcccccactcctccctctacctaacaagaggtgtccaacagtggcttaagcttcctggtgaaagtgagcccctggttcccgtgtgtatgcagagcccaggattcactcacccatggcttgaacctttaatggatacattcatcagttacctgtcaagtgcgtttcctctgtgccagattgtgtggcgctcagcactgtgaaagtaatgatgactaaacattattcaaataaatacacattcaacaacaaagtgtgaaggcacaaaactagcttgccagagagagagaagcctcactcagacaggggatcaaaggcccctctagagcctcctagatattggagagagccatgagtgatgggcatgcctccagcctgtgagaccgggggagcataccccaggcagagggcacttaggaaaaatagcacggggtgctagcgctgccagggacctcagtacacatggaagaaggcaaggtccagagatccgagtgacttgcccagggacacaaggcaaatcggtggaatcgtcgaggggtggaggatcagccacagccccccgcctcccacgccacctcttggaaaccagatacccgcctcgcggccaagacccaccagctccaagcggcggaggccagaggtagcgaggggtgaggttagaggtgggggcgagcggggactggacacctggggagtggggaaaggggaagggggcggcaccgctgacgtcatttccggggtcggggtatataagcggggcgcgagggcgctgctgctgccaccgctcctgccactgcagtgctcgagccccgtgcaggggagcttgcgggaggatcgaccgacagacggacgcacgccgaggcactgcgcccccagccccgcgccggtgccaccgcagcccgaccccggccgccagtccagccgcccctcgcccggtgcctaggtgcccggccccacaccgccagctgctcggcgcccgggtccgccatgcgctccgccgctgtcctggctcttctgctctgcgccgggcaaggtgagcgagcgcggggagctcgcgggagagggttccgggcgcccctgcccaccttgaggtccgggcaccgcgcggcgccccgcacccctccacacttcccttcgggcgcggcgagttttcagcaccgcggacagcgcctccgcctcccgcctgaccctgcagtgtggcctccgcctgggacccacaagacacttgggcctgactcccaaccccccggggcaactcccccttgtgcccaccccttgtctgggcttggcgcctcggttgcatcagggccagtgccggttgcgcggtggccggccaaggtcactgcggggaggtgggagcatggctgctcgcaaccctccacccctcttcccctttcatctcacgctccccgcctttctgcccttgacttctacttctccatatcatccctcacaatccccttcctccatctcttcccccgccccccccacctctggggtctctctccccttcgtctgtctcccacccgtccc

SEQ ID NO: 145 - DNA, 1990 bp, Homo sapiens
gtagctgagactacaggcatgtgccacgacacctggttaattttttttttttgtattcttttgtagagatggggtctcactatgttgcctaggctggtcttgagctcctgggctcaagcaatcctcctgcctctacctcccaaagtgctgggattacaggcatgagcctccacgtctgccctgaaatttcaatatcacagctatactgtatatctatttatgtgctgtatgtatgctgtgctttgtacataaaaaatatgttttattttttgccccgttggggtgagatagagaccgcactgagaatgcacgctttacataattagttcacaacttgcccccggcagcctccaccacgtaaaattagaagaaagcagcccagcagggcctacaaggaatgtgtgaacggatgcacgtaaagtgcttagcaaagcgtggtaaacaagagcccttgttgtcattcttgctttaagcctagtcccagtgatgtctgtaaccctctcttgggccaaggagtcccatggctctggagggctgttcagaggactaagtcattcccagtctggagctctacgggatcagtaggtacctaagggagtgaattgggcttggagggactgtggccagaagacagctctgggcctggtggtgatagaacttctgatttctcaggaaaagccaagaatgtggattttgggttaaatctcctgaattttaagcattggctcaattaaacaacaataaggcaatgtgaaccgaacaaaagggatgaaaccaagatttactgactttcccagagtcacgggcacggctgggattccaacaaggactcccaaaccagtgctctttccacttaacctaacgcacacccttcatctcgccgcccctccccacttccccgtctttgggagttcttcgatgcctcttcccccctccccccaggattccctccccataggccacccgccttccagcagggcgtggtctctacagaggaggtcaggtctcccaggcttcctcagcgtcgacgccggggagcgccctggggttgggagcgcccggggcccgcgaaggaggaggtggctcaggtgtcagggcgcaccgtgggaaccggccccgggggaggcgtggaaacgcggggcctgggactcgaccagcctctcccgtgcggatcgcaaaatctcggagctgaaacagcccgttgttcgcagcctccctctgacccgccaccctgcacattgttttccattcgcccgggtcgcgggtgggaggagaggcacgccggggttctggagcttggccgcgcgccaggcttgtggccttcgtccccctggggccactggggcggccacgcctctccggcgggaggagagaacgcgtgggtccgggtggctgctccggcccttccgcctccagctcggccatggggtcgcgcagctcccacgccgcggtcattcccgacggggacagtattcggcgagagaccggctgtgagtgcgcccgcgtcggcggctgcggaggggacggggcgaacccaggcgtctggggctagggaaggggttgggttgaaggatggacgaacttacaagtctggggtccggggctccccggagctggaagaccaaggcccctgtgcctgggatcgctgggttaggggcgggttaacctaggggtcccagcctccaagtctggggaggatccgggttcacggggtcggagtccagaggaatccaggcacccaggtgtcctccagcccggctcgaagctgaaggcagagctgacggcggttggaagggatggctttggttctttggttttcgggaggttgcgagccgcccgggtcttgaacctggatcttcgcggggtcgtgtcactctccctccgccccggccagctcaacccctgattccccgggatgatcgccccttccagccagcccccgctgttctggcccatcttcctggcctgttggggcgggtttctggagctg

SEQ ID NO: 146 - DNA, 1619 bp, Homo sapiens
accactgcactccagcctgggcaacagagtgagactctgtcaaaaaaaaaagaaagaaagaaagaagaaagagagaggtagggagggagggaggtggagagagagagagagaaagaaaggaaagagaaagaaagaaaagaaaagaaaaatacaaaagattcctaagaccaaaaattttgagaatgactgcattaagacaatctatggagaaatatacaggaaactaagtgttaaggatattggcaagaaagtggctgaaatgatagtcctgaaaccttgacttgatgagaagagaaaagaaaaggaagggaagattcgaggaaatgcgcaaggcccgccagtgccctgaggctagagcacaggtgtagtgggcactccagagggggccagagttcccaatctcggggtgggctgtttgaatttctaatgcaaagataggacctatcggggatgactgagatctgggaggtctccaccttggtggaggtggaagaggcggagggaagaacgttcctgggaaaagtggctgcatatgtccccctaaagtcaccaacttgcccagaggacactgtgtctgcaggggtgtggatgtgatgggggcgcgcctgtactggtgagcgcgatgcttcgcctaggtgaacgggacaggtacacgcgtggggtgggatggagtgttcatatatgtggcttgtgatatgtactgaggggacgtggggtacactcggatgaggggtctgtggacatattcgtggcgcatgtgggtatcgctggtgtcccgaggtggggagggagaatgcggagcgcgtgcgtgcggggggcgtccagtgtccctgaacctggcgtgtgggggctggagcttattgggaggcgagggaggtggccaggggagccgggaccgtgcgtgtggccaggccggtagcgcccagtaagctccacccgcgggcgctccccgtgcttccccgcccctgaacctgctccctcccagtcggtctcgccgcgctcgccgggtgtcccagtgtcaccaacactcggccgccgccgccagcttggcgcgcaccgccgcctccgccaccgccgacagcgcgcatcctccgtgtccccgctccgccgcccgagcaggtatgacggcgaaccctggctcgcacccggtctcccgcgcgctgcccggagtccctgcgcgcgcgccttctcctgcccaaccccggcccgcgagctcctgtcccggcctcagtttcccacgggagggcgcttgggtgcctgtctgaggcgcctgggacccggcctggggactgaacgggttgggggcggaggggagagctggaggctgggaaaagcccccagggtgcagaaggcagacggggccagggtccccggcgtgtctgggacctcagagacggcggcaaagtcctggcatagagtgggcggggcaagaagttgttcaagaggtgacaacaatgaaactcgagagcgctttctacgtgctgggcacagctcagcagagcgccttgctcaaacgacctaacttcgctcacagggcatccctgtggggtggttctcttgctgtccccattttgcagaggtgcaaactgagggtcagagggtggggaagcttccctacg

SEQ ID NO: 147 - DNA, 1665 bp, Homo sapiens
ctcagagctcagtagaaggaacactggctttggaatgtggaggtctggttttgctcaaagtgtgcagtatgtgaaggagaacaatttactgaccattactctgccttactgattcaaattctgaggtttattgaataatttcttagattgccttccagctctaaatttctcagcaccaaaatgaagtccatttcaatctctctctctctctttccctcccgtacatatacacacactcatacatatatatggtcacaatagaaaggcaggtagatcagaagtctcagttgctgagaaagagggagggagggtgagccagaggtaccttctcccccattgtagagaaaagtgaagttcttttagagccccgttacatcttcaaggctttttatgagataatggaggaaataaagagggctcagtccttctactgtccatatttcattctcaaatctgttattagaggaatgattctgatctccacctaccatacacatgccctgttgcttgttgggccttcctaaaatgttagagtatgatgacagatggagttgtctgggtacatttgtgtgcatttaagggtgatagtgtatttgctctttaagagctgagtgtttgagcctctgtttgtgtgtaattgagtgtgcatgtgtgggagtgaaattgtggaatgtgtatgctcatagcactgagtgaaaataaaagattgtataaatcgtggggcatgtggaattgtgtgtgcctgtgcgtgtgcagtatttttttttttttaagtaagccactttagatcttgtcacctcccctgtcttctgtgattgattttgcgaggctaatggtgcgtaaaagggctggtgagatctgggggcgcctcctagcctgacgtcagagagagagtttaaaacagagggagacggttgagagcacacaagccgctttaggagcgaggttcggagccatcgctgctgcctgctgatccgcgcctagagtttgaccagccactctccagctcggctttcgcggcgccgagatgctgtcctgccgcctccagtgcgcgctggctgcgctgtccatcgtcctggccctgggctgtgtcaccggcgctccctcggaccccagactccgtcagtttctgcagaagtccctggctgctgccgcggggaagcaggtaaggagactccctcgacgtctcccggattctccagccctccctaagccttgctcctgccccattggtttggacgtaagggatgctcagtccttctaaagagttttggtgcttttctgggtccctcagctcccgaagctcttgagaaaactatcaaaggctagaatccccttctaactctttttttcccccatgataagcgcagtcggtcacagttcaggtgagttcttacttggcattcaagaaaattacaaaatctgggtagttgtctgggcacgaagcgacaatggcgtctatccctggtgctgaccctgggaagcgctgacccaggtgctgaaacgcagacctctgaagctgctacctcttagcgtacctcacttccaaacgtcgggactagggcaaaggggcaatctaaagaccgaacgccgtatgtttgagattgtgagaagtctcgttcccctacagtttacttggtaaaaatggtaaaacaattctacttt

SEQ ID NO: 148 - DNA, 1647 bp, Homo sapiens
cggctctccgtccacgcggcgtcctccctgcagcccgctagggccgctcgcccgtcgccgcctgcggaacgcggaggggcagcacggccacgcccggccactcgaacctgctccccggcgccgcgtgaccgtgtcaggtccccgtcggcctcgccgtgccgaccccgggcgcctccacagtggctcggaggccgctgctgcccggatgcccgggttccacgaggctctcccagcccgacaagcccgccgatcccacgggcacgggcggaggagagggaaccgccgcgcccgccccgcgcgccgtcgccgaccccggtgggtcgcgcttccccgcgcacgccgcgctctggcgcggggagaggcccctcggggtccgcccgggtcagcgtcccgcgggggtggcggccgttcgctcagcctcctctcgacttccctttcctgtcagggctgctggggctgacaggctcccgggcaaccacgccggggaacccctcacgcccgccgatcgctgcggggctcagcagccgccccgtgcgctgagtcccctgtcatgagtgactccattgcgaggcgtttcgggccacgaagcaggaccgggggccgcactccgggtccccgccctgccctcgccgacctcccgcgcgtggaagggggacggcggcggcggagctccccgccacggagaaccccgaaatggtcatttcgaacgagaggagtgtggcctggggtgtctggtttaacagccccccgcgccgaaaggctgttcgccgaggaggggccgccggggagggagcccgagcgcggcggggcgagaccggtccccgcccggcgttgcccggcccgagggacggcggcgcccccaggaccctccccagcgcggccccagctcgctccgggaccgcggggccaggccgggcgggagcgcggggacgtacacggcggccccgcccgcgcgctcctcctccctcccggcccgccctgcgccggcggcggcggccccagtctccgcgctgctgaggcgcgcccggccgctcccacggcctcccctccgccctgcggtcccgccgcctccggggcctcctgggaccctggccctcgccgggcaggacgccgccagcgctgaaggcgcagcccggaggccgcgcgggtgagtcggtgcgcagccccagcggctccagaggagcgggtgcggggagggcgagcggaccaagtcggccgcgttcccaccttgcgcgcagccgggagaccagcaggcccagcctctagggaggagggcaggggagctgggggccgccccccgcattctcgcaggcacctgtccctaggccggggtccgctggctcgaagcactgacccgccccggacctagggggacggaggcagcggtgacatttgcccaggaagggcggcagtgggtaaactccactccagggcacgggtctgggcgcaggttgaggcctggggttgaatctgcttctgctagaggccagtgttctcagggaggcccataacccgactgggtctcagttccccctggtatgaaacagcaacagggcaagaggaggaaaccatgccacgctgcaaagctctgagcacgaagccgagaagaatctcggctcccggcctcgggggctgcacttcgggcca

SEQ ID NO: 149 - DNA, 1600 bp, Homo sapiens
aggattcacaccaagcagtgccacttcccagctccctgaccctgggctagtggcttgaactcctcgtcattgtccagattaggaatacgggttcgtgaaaaggactcatgtccctttagggttgctgtgagggttcaaagacagaaagtgattaaacagggccaaacacagacccgtgtaacatagagtaataggaatatggaaggaaaaataaccagcgctcttgctttctaatttaatgcaggatcttcatatcaccttcaatgatccctcttctagggacttgccacactttccaaactgccatcctgtagtggggtacccggctaggctgtggggagaccctggagagatttatgcaaaggaggacctggacaaatgggcccattcagctcctcaagagtggagaatagaagagagaggcagatcactgtttcttccgtgttactgagcacaggagaagcgtgaccaaaggactgaggtgggaacggggacagggcggatactgccagagatgcgaagttcgcacccttggcctgccctttgcacactactcccttgctatgctccccgctttggcagatccagaaagtggagcacaagactggggttgccctcgactccaggaaaggcttagctattgactagagacctgggcgttggtgaaggtgaggggaaagccagaatactggggtaggcggaacgccaaggggcgggtgtagcaggcaacctcagggaagctgggaaggcctggcagggtgagagaagccgcacacggggggcacagcgcctccctcgcgagccggtgcgaaaggggccgtcctgcggtgtgcgcccagctgcgctcaagggaccttgcacttggcccatctcctgcgcacagcccaggccgggaccgcgggcggtgcggactcagcgggctgggtgcaagggcggggcggggcgtctgcgcccggccccgtctcctgactataaaaacagccgctggctgttgggctccactccgccttccacgtgcacccactgcctcttcccttctcgcttgggaactctagtctcgcctcgggttgcaatggaccccaactgctcctgtgccgctggtaagggacgcccgggttctgtgccttgggatgccaaattcccagacaccatagagagtgtccctgggtttgaggaggtcgtattttgctatcagaggtaaaggggactcctttattggtccagtgctttcctgttggccaagctcctgagggcattttcctcctccctgttcctctatgtcagagttgagggtcctgaggctcaaggctgtcctgctccacgtcacctggttggtcacagggctgctggctgagccccaattctctaacctgactctgagctaccggattggataggagacattggataggaggggacattgcctcttccaggttcaggacagaaagtcgaagtcttcctgggccatgtctgcagcctgggactttcctttggagtagaaataggagggtgcttggttttcccagcatgaatggagaggacatggggcttctcttcctctgctctgagtgggaaaggagctctgagggctggctctgca

SEQ ID NO: 150 - DNA, 3410 bp, Homo sapiens; identical to SEQ ID NO: 64

SEQ ID NO: 151 - DNA, 1616 bp, Homo sapiens
atcttcagacatcttttgttaaaggtgaacaattacttaatactgtgttatggcagcactctatacgccccaagttttataaagtagagtcaagagtgatctgagctgggaaactcacgcaattttagttctgcatgaaagcacaggctctccccactggggaactcttttgagtaggacaaaaagctggacctaggacccagcccagggcgtgagagaaaaggaacctgggaggcaagagcggccggtccggagccgggtcctccgccagctccgggcgggcgctgcgcacagagcccaagcccccggcggaggcggcgcggctcgaggcccctccccgccgccgatgcccgggcggctgacgccgagcagcggcccggagcggtgggggccgggctggcgggcacgagcgagggcagggcagggggccggccgaggccacttacggctttaaatatggatcgcaggctcgcgctcgcggcacagcctccgccgcggccgccttccgtgagcccccgcaccccggcttgctcccgaggggcgcctgggctgggctccactgctgcagtgttagttactagcaggaacatcagagatccccataaatatgcaggagctgcaggaggcaaagtagagtagacgcccgcgctcttacacactcgctcgccgcgcaccacacaggctgtgtagacatccccccgcgccacctttcccctttcctcgcgggccgttcaggttgcagtcctgcctgctccgaagaccctcccgccccagcgcctttgccccgctctcccgcgctcgcctctctccggagcgcgcacccacccaggcggcaaagttgtgactacttgggcgcgggtgactggcgccccgctcgctccgcgcccggcgcagacaacttcccgcggctcggccccgccgcgtcccgggctcgcgcctccagggattccgcggccccccagcctccaaccccggcggcgcgccgggcagcgcttcggtggcggcggcggccgcggtggcagcgaaggcggcggcggcggcggcagtggcagtggccgctgcagccccacactccgccgccaaactggaggagcgacggaagccagaccccaggaggtgagcgcccggccccggcagctgccgggagggtcgatggggtccctcgctccaaggcggaggcgggcgcgggcccgggggccgattccgtagggcgcgcaggcggcctcagcgcgctcctgggagggagagagaggtcaattgcgggccgggcatcccctgagctgggcgcgggcggtgtgtggaggctgcttccgcggaaaagtattttttttccttcttagggtttagaggaagagtttgggtggtctgcttctccctcactgctaagtcccctgcgcgcaactgggcgtctttacgaggactgcggggccagttctgcggcgggctgggctcgggctcagtgacacgtgtgttgctgtgagcctgggtggtcgccctgtgaccaggcacctgcttgagaggaacacatccctaaacccatcacagggggagatttggggactcttggtgctaccgaggccgcggcccccacttcactgccagctccaggacggagc

SEQ ID NO: 152 - DNA, 1685 bp, Homo sapiens
actcacaaagcctgatggcccgtttcctgaacatgcgcaatcactttctagcctttccacaccatcggaatattgcacagaagtatgtcagtcacaggagtgtaaagaataacatttaaactatggtaatattttcattcagtaagtttctcccctttccttccttgggttagattcagtgcctgatttttttaggccctggggcgcaagcatccactttctcagaatcccattcaccagaaaccacccatttaacttgctctgggtgcgagcagcgcttgtgactgggcaacctgtgcgtcagcgtccccggtgcttcggcgctccggccagtgacggcgaccaaacccagctaggtcagacgaggtactgatcagcccaatgagcgcctggtgattctcgtagttaatcactctggttcattccgttcgatcccggaggcgggagtgtttggcttgtccctgcgtgtcacggcagggtgaccctagccccgagggagggcggtggtaccagtcctgctggcggctcagcgcggcaggacacgtgtgcgctttcagccgggtcgcagggcgcttatcgcggcccggcagtcggggccacgcctcacccccgcccgcgaaccccgacctggggaaacccggggcgctggggaggggccactgcgttcagctctggcggtccacagcccgaagcgcggcttaggaagttcgtgtcagcgctgcctgagctcgtcccctggatgtccgggtctccccaggcggccacccgccggctcccatcgtgacctccagccgcagcgcctcccacgccggccgccgcgcgaggggagcgctcgggcgcgccgggtgtggttgggggaaggggttgtgccgcgcgcgggctgcgtgctgtgcccactcaaaaggttccgggcgcgcaggagggaagaggcagtgcccgccactcccactgagattgagagacgcggcaaggaggcagcctgtggaggaactgggtaggatttaggaacgcaccgtgcacatgcttggtggtcttgttaagtggaaactgctgctttagagtttgtttggaaggtccgggtgactcatcccaacatttacatccttaattgttaaagcgctgcctccgagcgcacgcatcctgagatcctgagcctttggttaagaccgagctctattaagctgagtgagtaaattgtaaaaccagtttcgctgagagtgtgtgtctggaaaggttggtgggcgttgtgtatatatttgttagaaaatcggtaaccgttcaaacgagacgactgagttttttagcctttcgcagtttcatttgaaagtgggtatgcagtttaaaactgacagttcaaagtggtttttcagaaaatgatgccctggtgcaaactgattctgggtcccatagtgtgttaagtgtgggttggtaaaaactcttggcctttctccaaatgtatgaaattaaagttgatattggaaggataaaaacccactgagcacagaagttactataggtggaggaaacatttgttgatgttaatattttaaaggggttgaccaatataggaattggtcaatgacaattgggaataggtaaatgacaaattattggtcaatccctttaaagctttggatggtttgctaaagaattattgaactcccttttgtaattttctgtggata

SEQ ID NO: 153 - DNA, 1661 bp, Homo sapiens
ggctcacaaatgaactgctttttattcaaagaaccatgctgtctgttttcgcgtgggtgggtgtgtaaccggggcgggcgctatgttggttttgttccctgcaaggttgacacaggcaatggcgacttgcggccacactggggcagcctctcctcggctggcagccgggccgggcggctcgctcccgggagctgacaatgtagccaagtcctgctcgtcggggccgcaaagaatttaaaggggtctagaaacatccatcttttccccttttcacagttaacagcgagctcagggctctcggtaaaaagaccaccgggaggaagaaacgctcagggcgtttttgttattgttcgcaaaatcctctatcgcccccaaacgtccagcccgccccctccctaaagcggagggaaaccgggagaggagggagggtcggcggcgccggccaagcgcgccagtacacgcccctgcggatccgccccgcggccgggtgacccccgccgcgccgcgctggaggccccgggccggggtgggcgtggggctgaactccgccacccccgcagcccgcggcccgctcgccagcccggcctgtgattggcttggggggcgcgtgtgcccgccccggcgaacggggagggtaccctcgcggcgccggtgggaggaggcggaggagggggcggagagagcgggggcccggacggcgctagcgaggaggcgggcgagccgggtccccgggagcgcagaggaggctcggaggggggcggagagcggcggggcgggagggaggcgcgggtcgcggggagggaaagcccggccgggtctgcgccgccgccgcgcgcagtgagaggcgccggggctgccgcccggtgctcggcgcgctctcgggagccgcccgcccgctggtcccgcagccttccgggaggaagcggtgccggcagcgtccagggcgcgctctcgggcaccctcacctgccggcgcccggccgcttacccggcagggcgtgcgcagggtagggtgcgggaccggggggacctggaggcagaggggagaaccggccgtccgcgccgcagcacagccgctgggagcgcctcagaccccgcgcggggcgccggctccatggcgaccgggctcggggagccggtctatggactttccgaagacgaggtgagtggcacccccttcctgctcgggactccccggggagttcctatcccgcgccggcagggggaggggaaaggggccgtccccggggtgctcgtgcccagcgtctgcaggggagccccaaagcgggagcgccccggagcgggatccaggggagcttgggtccttccgcaccccccaccctccgcaagccgagctcattgtttgtaaataaagcggcgcgacgcccttggagctgggggttcactccgcagctcctcgctttcgggaggagagggagggggcatgcgtgcctctcttccctcttcctctccaagcagcgtctcccggggctgttgggcaactttccgcctctcgcccctgcagcccgggagtccatgatgcatgtcacgtctgggtcgcgcggctggagacccgggactgcggagaagccggatcgtttccccctggaactttctctctcatgattgtgtggatcagcaggcgctcagaagcctgtgcgt

SEQ ID NO: 154 - DNA, 2115 bp, Homo sapiens
taaattctctgggcagtgccctgtatctttattagaaagacttcttatttttaacaattttatttggaagaagttctactcatttgcatcagttcatcgtctacataatttgtgtgtgtgtgtgtgtatgtgtgtgtttacaactttgacttttgaaactagaatagaatcaggtaaaacatctaagatcagtgtgccagtaattggcctgaatcatcgggcaccatgatgggtttggccgccttcaacgtactcggtgtacattctatttttttcttcataatgttcagtactgtagtactaatcaccgagaaaattgcattgacgcttttcgaccaccagggaaatattcagctcatggttctcccctaaaaaaactaaaaagcagctaagcgctgggaacaaatctgacttaatgcattttctcagtgggccaaagaaaggagggccgattgactgctttgactttttaaaggtcttctctttgttcacttataaagtgaggaaaacaaattctcggcactggcgtgagagttatttgagcgtcacaaaagaaagcaaaagaaaatattagtgccattattgtggcgaatttcatgtttcccagcgagccctttgattcctggtttgggctggcgctcgagctctccagccgggtatgacttcggccacaagatggcactgacctgcaaacaaagaaaagcacagtggcaccgactttttcaagcctcgggaaactgccctgccttccccggagtcgaggactgtggggattagggcttcctttcccctgcgcgggaggtctgtgtcgaataatgtgtggcttctgttggattgcttttctttccaaaattcctaggcaatgcttccccgaggtgtgcacctttgtgaggtgtttgtggggttgggggagcttcaggcgctactcgcgggacgccgtcacgtgatccgggatgaggtggagttcggctttaaggaggcgtctcttcctagcttcatcaatctttaggatctgagcaggagaaataccagcggatcttccccactctgctcccttccattcccacccttccttctttaataagcaggagcgaaaaagacaaattccaaagagggtaagttgcgagtttatgcctttccagagacttctgcgaaatctctcattgacaaggtgaaggatgagaggggaagaaaaacgatgcgagtgtccgaaactggctctgggggaccaaggtggggtctccagtgcaggcaggtcgcaggttgctccaaatcaccggaccgttcgcgggctcctgccgaagggtatggggacgacgcgggtgaaaggagagggtaccctacgcggagttcgggctttcccaccacctgctcccggggaatttctggatggggatccaagttttcctttaccccggttctctttaaaaggccgaggcactgggaaggcgcccgagttcgcctatcccacacccgctcattttccttacgtgtcttgagctggctggaggcgctggctctggccgcaccggagttttcgcggagtaactggctgggatgagccggagaagggtgggcttggcgcgtcgcccagcgtcgcacgggtcccgcggcaggtgtcgggctgggagctggcggaggtgggagtagccctcggcgcggaccccagcgcgcaagcccacccccacttgcgggttccgcgcttctcggctgcaatcgagccgcgctccgcagtaccgggcgcttcgagtgtggcgctgcgccccgatagacacccgaagcttttaatcatcggagttctaatcagggaactctttagctctttcttttagaaaagtaatgatggaacgtggctgggttaggagattgggaatggacaggaggtggaggtgtcttgatagggtgtgccattggttcccaggtagactggagagataagaatgttttaaggtctgatgttgggccaaagagagagaattgacttcggtttgggatctgcttggttttggttgtttatatcttttctcttttgccagtctcttatcactggtagaaaggttttttgatgagagagagagagagagtgagagtgtgtgtatgtgtgtgtagtaggga

SEQ ID NO: 155 - DNA, 2178 bp, Homo sapiens
agtagagacggggttttgccatggtggccaggctggtctcgaactcctgacctcaggtgatccacccgccttggcctcccaaagtgctgggattacaggggtgagccactgcacctggcccacagcaagaatttttttctgaatagcattttacgtgttaggcgtctggctgtttaggagatgaggaaactgaggccctcagttgccaaggtcacacagctggtaaacggacggagccagaatgcgagtacagctcctcctgcctccaaaggttctctgggccctgtaaaaccacgggctgcacaggaaaggcaggctatatattgttcttcccctggcccagcgccctgatccaatgcccggacacacatccacaccaagttggacgaaaaggtaagggagaaaccttccccaagagaagaagcggtaagctttggttctaaaggccctgggttgggtccgtcctttgccacttctcagctctatgcatttaggcaaatcacttatcttcttaaacctccgcatctgggcctacagggcctctatgggttttttttctatttatttatttatttattctttttttttttaactttacgttccgggatacacgtgcagaatgcgcagatttgttgcgtaggtacacatggcatctacggtttgattcagtctgaaatggcgctccaggcttcatttagaaggtgaagcactctgcaaactgcgaggccatacagagattccagaatatgattaaggccctaaccttgctaagctggattttctttatttcccaaaaagaagactaatactatccacttgtacaaccagaagggagctcacgtgtaaagcgcctcgtccccggccggcctcaagcggcgctagctctctggctggcgctggagtgtgccgcccctggcagccccgccgctgcagcggggagcctgggagagcggctctcggagtctcaggcagcaggaggagcgtgtgagctgtgggcgtccctttaagagcggctggccaggcacggcctccgcctctcagtacgcggagcgccggcggtcacctggggctcgcggagcggccagatcgcggcggagtcggcgcgcttccccgagggaaggtgggagaggggacccggacgcgaggtgccccgaagccctctcgagcgtaaccgtcccgcgcctctctgaggcggaggatgcgggagcgcatctgggcgccgccgctgctgctgctgctgccgctgctactgccgccgccactgtggggcggccccccggacagcccacgccgggagctggagctggagcccgggcctctgcagcccttcgacctgctctacgccagcggcgcggccgcctactacagcggagactacgagcgagcggtgcgcgacttggaagcggcgctgcgcagccaccggcgcctgcgggaaatccgcacgcgctgtgcccgccactgcgcggcgcgccacccgctcccgcccccgccccccggcgagggccccggcgctgagctgccccttttccgctccttgttggggcgggcgcgctgttatcgcagctgtgagacccagcgcctcgggggccccgcatcccgccaccgcgtcagcgaggatgtgcgcagcgacttccagcgcagagtgccctacaactacctgcagcgggcctacatcaaggtacccacagagcgctcctccactgcaaagcccctgcggctctcacacgctctcttgagccctccctgctgcccccgtcatctctgttcagtctttcgaattgggtctccttaaatatgtgtctcagtttgtgaatccagatatctggtggccctatctctgtatgcaacaattgattaacttggacaagtctttttctctctttctcagagccagcttctctctcaaaaagaggactgtcctgataaggtgatgtttaaagtacccattcagcactaattcatgaggcattgacaaagctgaatctagtacaatttatcttctcccttctcacttcccatttctcttctcccttctcacttcccatttctcttctcccttctcacttcccatttcttttgtctcctctctcttatccttcctatactgtagtctgcaccttttctctgaagtttaaaagaatcttcaaaatagtgaagttgaaagacctgttccaaaac

SEQ ID NO: 156 - DNA, 1680 bp, Homo sapiens
tgaggctagagaatcgcttgaacccaggaggcggaggttgcagtgagctgagatcgcgccattgcactccagcctgggcgacagagtgagactccgtctaaaacaacaacaagcaacaacaacaacaaacttcaattatgtttggaaagaagtgctaatttaatttggcaaagatgaagacagcagtcataaagcaaaacattcggtctcaggttgggtggattcccacctagttgacgaggccagctgcagattcaggtgggatcacctgatgatctttatcaatgccatttctttctctggatccttattactgacattagcaagggctttcagctgcccagaagatgttctttgcagacatttgctctcccgggctgccagcaggctttacaaatttaaaactttcagtgtaggaacccagcctccgtcgtccttcccctccaaagttaagagatctgctctaagggttcctgaggggtggtctggggccatgggaacaggatcaaggccccctgagcgccgggcctggcttctgtggcttcgcaaacttttcagcctgtgtgccacggcgacgcgcagcggctgagtcggagcccacgcggcgcgcgcctcccgcgaggaacttttcggcttgtaggctgcttgtcactctcgctttccgacgcgcctccccctggctcgcgctcccggagttccctcccctcctggcgaggacctttcccggcgcccgcggctccgatccccgccgcgctgcgcccgctctcccggccccggctgccccgctgagggctcccctctcccaggcaccgcagccgcgcccccgcgtcccgcctcccgagcggctcgcttcgcccgatgccccggccccgtcccgcgcactgagcgcctggcagcagggcgccgagtcccggggcgctgcggggcgctgcgccgagaacggccgggcctgagccctgggcggcccccagagccgatcagagcgcggggaggcgggggcgaggaggaggggacccgccgccgggggctggctgcttcgctccgagccgacttttcgccaatggtccaaagggacatgtccaagtcgcctcccacagcggcggcggcggtggcgcaggagatccagatggaactgctagagaacgtggctcccgcgggggcgctcggagccgccgcacaggtagcgagagcgcggcgccttctccttcctttgtgagccgccgggcagggcaccgacctcgggttctcccggcgcctccactgcagggatctctagcctcgcacctcctcccctcgtcgcctgcccaccctctgctcctctcctggcgccggggaccctgcccctttgcgccttttcctggctctgcctcggcttccatttttctctgcttccgaaaagccagtggggaagggcgggggagacctgccagtcctcccagacttctcccgggttgctccagctggccctcctcgccccttcccgggagaggcacatggagagacatgaatcaggggagtggactggacctgctgaagatcgtgagtccgggtgggcgggagggggcccgcttcccgcagcgctttctacgatgccgactctcctggccacgctccgagccggggtgggcgtgggtgtgaggatgatggggtgcaggtgggcaggaggggagcgaatatggg

SEQ ID NO: 157 - DNA, 1509 bp, Homo sapiens
aaaacaaaaaaaaaataccataaaagaatacttacattaacaaatgggaagaaaaaagccacatataagtatgtacattgggctatcgttttattaaaaaagaatactccaaaatatagtagtgtttatttttggataatgagactacaggtgatttttgttttttcttttggtacttcccatgtttcccaaactttctgtattgagcatgaattactctcttaagttactttacaaacatctcaagtttggtgccaactctgtgttcccatatatggtgttgttgctggacaccacgtatgactccaacgtgtccagaaaccaccggggtcccccaatagggctagtagcaatctagcagcaactccaggcctgtaaggggttagtgctagaacattacccacctcagtggctctgatcagtttgggaaaacctcaataattatccaacttggtaaaatactttaggtgtcccctttgaaccaaaagagatctctgaaaaggcccaaggaactactttatacatcctctacacgtttaagataatctgaacacatagtagagatctgccagactatggacatgggagctgtaatcctcacaagccgggagagccggggagagggtccgagtgggccggcgcggggggcgccaggttgccagccccagacccgaaatcccaggcaggcccagggagaggggactctcgggtggcttctccttacttcgtgtctttgcctttgctcttgcctttctttttgtcctttcccttcgacggcatcttggcttccccaggggctccgctgtcgtagttgcccagccgcggccgccctggccagctctgtctccaagggaaccgggacgccgagctggcaatgccccacccgcgccgctgacggcgcgcggagagcgcacgcgcccgtgacgtagcccaggcgccgcggcgcgcggggtggggcggaggtcgcgccgagggcggcgggctgccgcgcaagggtggcgcgcgcgcggtgagtgtgcgagtgtcggcggcgccggatcctctacgtggggcccgggctctgcgggcgggaggcgggagctggcagccccaggcggtagcgcttcgtcctgcggcctgggtgtgtcaggagtcgctgcggtcggggcgcccttgcctcaggagacttagatccccgctgatccgcccgtcccgccgcagtggtctgagccgcagccctttcccgtgccgcccgcgggtcccgttcctcccgtgtctccatgccgcagccagcgtggccgcggctaccttgccctcgcccccgctccgcttctgccgctcccggcactgccttactcctttgggttgcatctctttcctggcttttcacccttgctgattctgtaagggatagtgcagccagcggacgtcccaggccaaatgttttttgataggcagtcgaggactttcccgagggcggtggttgagggcgaggctgccagcctccgaagagcagcggcacgccaggga

SEQ ID NO: 158 - DNA, 3311 bp, Homo sapiens; identical to SEQ ID NO: 87

SEQ ID NO: 159 - DNA, 1608 bp, Homo sapiens
agctttttcctggctctttcatatctttcagggttcagcttaaatgtcacctcctcctttcctaatcacactatttgtacttttcctgcacaggctttatccaaatttgattattttctcacttctttattgtctgtctcccccactagattacaagctcccagggcagggtgcgtactgtctgcagacaacgctgttatcaccagagcccggcactgagcttggcacatggcgagggctcagtaaactgaatgctgagtgaatgagacgccacgcgccgctttgccatcggtgctttctgagtgacgttaaaacgctctggatggtggcactgggattatggatggggcttatttagctccctccggcttgctactaaggggaggggtcgtcggtgggcctttcggcgccgctgcaagccaccgggttccgaagtcggaggccgaaacggcgtgggccccgaagcggggccgcttttcagggagtgcgcaggttagcgaggaccccggtgaggcgagacgccaccctcacttggctgtctttgttgctcccacctccccagccccagccgcctgcagtgattcgtgactcccgcaggcctctaaggaccgctgcgcgagggagggggcccgaggcgcccccggcccgccctcctcccggtcttcggatccgagccggtcctcgggaaagagcctgccaccgcgtccccgcagccaccctctccgcgtgcccggccctctccagtggcgggggcacgtgggcgcgcggggtgcgtggcaagccgcccctctccccacgcccgtccggccgtctcccgcgcgcgcgccccgcacacagcctccgtgcagtgggcagagcccggccccgcgcgcgccccgccccgcccctggctagccgcgcccgcccccgcgctcctgcttcctcccctctttccctccccgcctcccaggcgcgcacccctcccctcgcgcccctcccgcgccctacatccaccgcccggcggagggggctcagtccgcagccgccgccgccaccgccgcgcctcggcctcggtgcaggcagcggccgccgccgccgagacagctgcgcgggcgagcatccccacgcagtaagcccgctttctttccgcttgtgcgcgcgtgtgtgcctcccgcccgccggcgtcctgggtcccgggggagcggctgcccttctgccccgccgccgccgccgctcggggctggtccctgcggtcccggctgcctggccttccagggctgggtactgcggcttcggcggcctcgctgaggccgggggccaggggccgtcccgggctgcggggtgcgggacgagggactgcgagtgcgaggtcccccctggtgcgtgcctcggccttccctgggtttttggctcgatggggactaagaggcagtggggtggaggtgggggggatcgggagtgaaatgggggctctccatgttttcctgtgcgggggatggtggggagtgaggagggagtgaagggggggccctggttttgtcaccaaggatggcgggcagtggggggtggggcgaggtggggacacctcttggttctttcagccaggatagctagcaggggctgtgggga

SEQ ID NO: 160 - DNA, 1828 bp, Homo sapiens
aaacataaatagctatagaatagtaccatgaaagaccaaggccttatttggaagaagtgaggagaagtaatcaaggaagaccttttgcagcagacagcttgtgccagacatttgagggtagaatggaatgtcttaggtaaagatttggagtaaggacatttcgtacagggcagagtgaacaaattctctgatcaccgcaaaaggtaaggcaaactgacaaattgatccctttttaattttgtttttaattaacagaactaaacctaacggaaagaatgtgttgccggagaagaacgaattgatggccttttattaccacaggaaaaagtaaatgtatctgggcagcccctcaagtctcagcaaaaggaacgtacagttcctgccatgtgccggtctcttctgaagaaaagggggcggtgggggtgggggcgcaggtctttaggttgtttattcctttctctctgtccagtggcagagaagcccatacttttgaacgcagcttgttggctactgtaaaagccctgctctgagcaaggaccaatgagcacgcggagtccaaactcttggaaacagtttgtggccaggagtacttgacattgagacagcctccgagttgtaaacaagggcgagcctgggcgggaccccagcccacgcgactcggagccccgtcccaagaggctaatcttaagcccacgttgccccagatacctgtttctgcttcctcttccctgttcttcccaccctttttccgtcacagccgcgggcaccggtgccagggcactccgtggtcaccgtgccaggccattctgtgatgaccgcggctggaggggcggagcccatagttctttctctgatctgattggcgcgacctggagttcaggacgcgtttccaagttccagtgactcctcctgtttgggactcggggggagagtgcggggagacaaataaaacctcgggcggcggcggctggtgggaagacttgaacttgaatctcgaaccactgcatctccgactctgcccagactcttcactccgcggcaccctcaaaccccagcccaggccggggcgcacaagccagccagcgcacctgcagtcctcgcccggacgcgccgcgccccctcggaaccaggctctgctccgagcagccttcgcccctcaagccagccacagtccccgccaggccgggtgggcgtcaagatgaaggcggcccgcttcgtgctgcgcagcgctggctcgctcaacggcgccggcctggtgccccgagaggtggagcatttctcgcgctacagcccgtccccgctgtccatgaagcagctactggactttggtgagaggggacacagggcccaagctgggtcctagggttggggaactgccttaactttcagccttggtagagggagggctaggctcaagctaaaacaactggggttcactttgctgctgagccctggagcctcgacgccagcacacctttccttttcctagatttggttactttctgacaggggtgcctccaggtcaaggccacctgcaagcctgccgacgctggatggtttgacttcatctgcacactcttctttctgacccgctcttccagtcaaaatactttttgctttcggtcaccgtttaacaatggactggaaactttatcctctccttcacagcatagtactgcttggagaagtttctgaatagtattaaatagcctcaaattaacagattttattccttagccacctggcatccttccacagggtacatctctctgcattcctgacagatttctttgtctctttatcattatagttttccatatatttgcat

SEQ ID NO: 161 - DNA, 2180 bp, Homo sapiens
acaccctaaaacagtaatattcacggtaacagcaaagcggaaatcagcttttcctgaacatgtactgaattctagtcacattcacacacgttaattcatttaattccagccacaaggtaggcagcctctgttaacattttacaattgtgagaacgcagagatctgggactggctcaaggtgacacactgcagcaaggagtcagaatttgaatccgaagcagtgtccttccccctcgcaacagctgcggcgttacaaacacaggtcagccacggagaaattaatgacccacagccatccttgcagctctgcgccataactggggagacaagctggttcccgtgactcttcagtctgttttcacccaagtgcatgactgcgggagcaaagcgaccacgtgagcatcccccccccacccccccgcttcccccaggcgagggacagtgccaggccaaggacaagtcacaggtgcaacaacgtgccagaactggatccggagccccagggcgcaagatctcccgcagcgtcacccggcagagggacgggtgtggccaccgggcgcggcaggtcctgcgtgcgctgaaagtgcggctggaggcgcggacggctttccggagccccgagagaggagctaggaatgactttggtcgcagcctctgtaaccccgcatgacggcctctagggggacagcgaggtccccctcgatctctggctgtaatcagccggcggggccagacggtgccgagactccagggcgaggccgcagggagggggctgtcccgccccacgtggaccggctccccgctgggggcgtggccgccgaagcgggccgggccaatgagcgccaccgtcgggctcacccggctgggcacgccgggccgaggagggctgcgtcatgccgggggcggggcttcggggccggcgcgaggcgcggcggggtcacgcgggtcgctgcgcgggctataagtaggggccggcggggtgctccgctggagtgatggctgccggcgctctctgcgtggttcttcttctcggccgctgaaacccccgcggctgcttcctgggaaggtcgtgagtcccgctgagctgtccccggtgccgccgacccgggccgtgtgcccgtggctccagccgctgtcgcctcgatctcctcgtctcccgctccgccctcccttttccctggtgagtagtggcgccgcctcgtaaaggctctttcttctccccggggccgggcgcggacgccgtggcgctggaggcggacgccgtgggcggcgcggctggcttctctcttcgccgctggccgcctccactccgcccgtctgcccgcccgcgggcctttttggcggtccccgggcggcgcgcgcgggaacggcccttttccgattttcgcgcggagggcgcgcgcgggctggcagcgcaggggctgggctgggcgcgcgcgggccgcggaggacccggagccacgtgcctctccttctcgcgcgtcctactggggatgggggtctggagtagccggcagaggctattgcgggaccccgggcgcgtgggtagagcggggtgccccactggccccccaggggcacgcagctattgttatttcccccctcccccgcaggatgaacttgcgtcctttctcttctccgccatggaattctgctccgtgcttttagccctcctgagccaaagaaaccccagacaacagatgcccatacgcagcgtatagcagtaactccccagctcggtttctgtgccgtagtttacagtatttaattttatataatatatattatttattatagcatttttgatacctcatattctgtttacacatcttgaaaggcgctcagtagttctcttactaaacaaccactactccagagaatggcaacgctgattaccagtactacagctgctaccgccgcttctggtcctttggtggactacctatggatgctcatcctgggcttcattattgcatttgtcttggcattctccgtgggagccaatgatgtagcaaattcttttggtacagctgtgggctcaggtgtagtgaccctgaagcaagcctgcatcctagctagcatctttgaaacagtgggctctgtcttactgggggccaaagtgagcgaaaccatccggaagggcttgattgacgtggagatgtacaactcgactcaagggc

SEQ ID NO: 162 - DNA, 1710 bp, Homo sapiens
ccctgcggcttttgaaaagaggtttcaggctgacaaatatccatatatacatatatatttatatttaagcctaaaacgactctttgatccctcccctaagacctccttcccgtccgcctaggcctcggtatcccccaccaggtatgagaaggaggagtcttcattcttcccaggcggggagaccacgccttccctgcctcctccctccgcggggggtcgcgttggaggtcacccccgccccctaggcgctgggttgggagtgacgcggggtgggctggagaggtttcctgccgtctgggaagcgtaaacggaccgcccacctgtcgggcctcggccgcccgcacctgcttgtgagaagcctgcggctggggcaccgcccccggtccccgcccgggtccgcgcattgggagcacactggccctttaagagcgcggcggccgcggcgcgcggggaggagggctgggagcgcccggagccgcgctgaactcgccggggacgtcgggcgcccgctccttggctggctcgcttgctctctcgctcgctctctcgggtcggctccctgcgcctcctcccgggactgcttggggacccgggcccggtcgggcgcggcggcgagcagaatccccgtgcaggaggcgcgcgctccgggcagcgcccggccccgggcatggacagagggagctgggcgcgcagggagcgccgcgggaccgggcggccggagcgctgagccagacaaaggctccggagttgcgcttgctctcgggagccgggccccaggcgctgggcgccgaggctgcggaacctcgccgggggcagctccggtcggccccctttcccgccggctggttccgagctcccggacctgccctgcccgcttctcctcgggcttgggaatttgccgaggcgacctaggcggctccggcggggaccgggagcccgaggtccgcggcgcgcctgccgggccaggagccagggagcgtcgcaagtttccaaggcgcgtgcgaggatccggcgtgcagtgttccgagctgggctgggcgccgagagcatgggcagcgacccgagcgcgcccggacggccgggctggacgggcagcctcctcggcgaccgggaggaggcggcgcggccgcgactgctgccgctgctcctggtgcttctgggctgcctgggccttggcgtagcggccgaagacgcggaggtccatgccgaggtaagacccccgccctgccctttggctgcgggctgggggcttggagggagaggcgccacgtccgcaggctgggacttggaggtggagggagcggagacgcgccccctgttctgggccgtggcggggaagcaagcggacttggcagtctgcccctccccagctcgccctctgcagcgcacctcttcgcaaacccttgagggcgcagggcctcgctctcctccccgctactcctacagccctgttctgggcactgagcccccaccccgacccccttacattcagcctgtgtcccgggagccgcttccgccgcccccagcccttgcctcccctccttccttccctccagggcagccgattcctcgagagcccggctggcgcgcagtggcgctctttgcgagtggggagggggctgctctcggggacagccacaggcggagcaagagctgggcggctgggcaactgcgctcctgcccaggtggcctcccgtctgggtgataccg

SEQ ID NO: 163 - DNA, 2472 bp, Homo sapiens
cgtcccagatcacccattccagaaatgtgaaaccgggccctcacaaagtcgtctctggtgaagaggtggcgtgcggggtgggggttggtggagggtgaaggcataagcaaacatattttaaaatccagatcgtaggaagtgtcacctggcccctcacccaggcatgctttctgggggaagcgcagggccaagctttccctagaaaagctggggcgaagagagagcaggcggcggctaaggagctcctggcaggctgggaaggtggagaagtggggtgaggtatttttctagaaagtgtagccctagctcatctcctagattggggaagagggaactgagggaggagggaaggagacccagggcagctccaggatagggaaatgttgaagaagggactgcgttctccaaccgaaccctccctcctgggaaccgcagcccagcgcggtaactgagttaccgcaaccgggcggtggggaggaagggtggtccaggaaaccggcgagggagaaaagcggtggaagggagagtcttctccctggagcggccccagcagtacaaagtgctggtcacagcgccccttccgcccctagattgacgagcagtggcgtggagccagcgcggaggctgccccctccccctcccgagcccgcagcgcggagcgcggtttagcaccaacggagccgggggcggcgtctttgggatggaaaagggccaaaggggaggagtggggtgggggtgggggtttcactggtccactataaaaggaccgctcggctgcccggttcttgcactcgctggaaagcggctccgagccaggggctattgcaaagccagggtgcgctaccggacggagaggggagagccctgagcagagtgagcaacatcgcagccaaggcggaggccgaagaggggcgccaggcaccaatctccgcgttgcctcagccccggaggcgccccagagcgcttcttgtcccagcagagccactctgcctgcgcctgcctctcagtgtctccaactttgcgctggaagaaaaacttcccgcgcgccggcagaactgcagcgcctccttttagtgactccgggagcttcggctgtagccggctctgcgcgcccttccaacgaataatagaaattgttaattttaacaatccagagcaggccaacgaggctttgctctcccgacccgaactaaaggtccctcgctccgtgcgctgctacgagcggtgtctcctggggctccaatgcagcgagctgtgcccgaggggttcggaaggcgcaagctgggcagcgacatggggaacgcggagcgggctccggggtctcggagctttgggccagtacccacgctgctgctgctcgccgcggcgctactggccgtgtcggacgcactcgggcgcccctccgaggaggacgaggagctagtggtgccggagctggagcgcgccccgggacacgggaccacgcgcctccgcctgcacgcctttgaccagcagctggatctggagctgcggcccgacagcagctttttggcgcccggcttcacgctccagaacgtggggcgcaaatccgggtccgagacgccgcttccggaaaccgacctggcgcactgcttctactccggcaccgtgaatggcgatcccagctcggctgccgccctcagcctctgcgagggcgtgcgcggcgccttctacctgctgggggaggcgtatttcatccagccgctgcccgccgccagcgagcgcctcgccaccgccgccccaggggagaagccgccggcaccactacagttccacctcctgcggcggaatcggcagggcgacgtcggcggcacgtgcggggtcgtggacgacgagccccggccgactgggaaagcggagaccgaagacgaggacgaagggactgagggcgaggacgaaggggctcagtggtcgccgcaggacccggcactgcaaggcgtaggacagcccacaggtagaagaattgctctcgtttgtctgtccattcatcctcctctcctcactttatctatcccacgcgacttcagggtagactcctgctggcaggcaggatcataagtccgcggacagaacggaggcctggagtggaggaatgtggtttgaggtttggattggtgaactcagctagaaaacatacttgcatttgcccgaataatgaataaccaagaaaaaaactgacaaacgattttctgcaaactaaagcaaagcatttaggccggggagggagagtttgtaacctgactccttccacctttagcgagttggagcttgtgcgagttctttccactctgtgtatttctttttaatgattttgtgtgcgccttttgtgcgggttgcaacgttgcgctgagttttgtaaccgctgcctgtgcgtgcatcctgcgctcacgggagggcggatgtggagagggcagaggagcaatggtgacctgggaaggtaccctgagcggctac

SEQ ID NO: 164 - DNA, 2012 bp, Homo sapiens
aaaacagaaacaaaaaacaaacaaaaaaaccactaaatttgaaaaatgttaaatcaacttctttgctgtattataaagctccatttccacccctctttttagtttaggaagtttaccgttatcggtgaagtaattattttgttaattacaaaggtaagtaggttctttctgaacaatcaggatgtaaacttaatgctagtgaagtaattaaacattttgaatgttaattaaactcagtccagttaagggttttatttactactaacaaacgtattcaccgtgtgctaagtgctgcagggaatcccagcccgttttcctccatctaaaaggaaaattaggaggtcccaatactttacttgtagattttccagtttctaccattccctgtaaggcactgagacgcaagatttcaaggcccactcggggtaccctggcatggacatcgagtcgttctagcgctgagcttcaaaactattcctttccttccctttcttcttcataccagactctaatctgttctccctagcttcgaattattcactgtatggtcgaacatcttactccacaaataacctctgaagtgttgcagttgtcttacccaaatacctgaactcagcttgtcccgagtactgcgatcccgcgtactgctaatgggaatatagttaacccaactagtatgaggtccccagtacacagcagctccaagatcaaggcgaccgagtaacactgcttgcctagactcaggccaagttcggagagtgatcctggggttattttagaacgtgtcccttgcttcccagaaaaattcagtcgttaactcaagtccagatgcccaatgaccattcggataaggtgagctaaagcttcaatgccttgaggggcttggcagggctcgggctcatcccggagaagcagccccgctttccagactagcagttcccagggatgggtgtgtgctaatcgcaggccaacaagcccagcgcggtacagaggtcccattgtgaccggaggcgagaaaccccgcctcggcaccctgacgcagcgcaggacccgccccgcgcgtgacgccagcgtcaggccagccccggcatgctctgcggccgcccgcggtccagctccgacaacaggaattttctccgagagcgggccgggctcagttcagctgctgtccagacccggatcggcaacagtgccgcctccagacgttctcctgccgctcgcccgcccgtcccagcgcccccagccctcccgcgagggcgccccgggacggaaggatccaccagtctgtcggcgcccgccgttctcgtggtcgccgtcgccgtcgtcgtggtggtagtctccgccgtcgcctgggccatggccaattacatccacgtccctcccggctccccggaggtgcccaagctgaacgtcaccgttcaggatcaggaggagcatcgctgccgggagggggccctgagcctcctgcaacacctgcggcctcactgggacccccaggaggtgaccctgcaggtaacgcccacacctcagctctgggtctcttatgcccctcacgcggctctgggggtcctcaccacaatcgcctctgtcccacgatgaccgaggaggacctagggcaacatctccttaagtctattgggaagtgaccctgtatttcccctcacacctaggagggtcactcccccttcccgtcgcagttgctctttgagattgacctgaggcacattttctctttctagaagccgctgcgtaagtgacggacccatccacggggggagattcctgctgatagttgcccctcctcccactccccagtccacggtcactgcaaaatgaacctttccactccccttgcacggggtcctcgtctacctcctcccctcccaccagtaatgcagtcattaatcctctctgatctttccttcctctcccctccccctgcgatgtgctttcattgatgcctcacactgcgttttgtcttcccaaaccctagcgtactcaattcccaaagt

SEQ ID NO: 165 - DNA, 1599 bp, Homo sapiens
cctaggtatgccagatgccaatttttcttggccagccagggaacgtctcatgtctttggaagaaattatctttctcttactggattcttctgagaaaagtgatttgttaaaagttttggttatttcaaatcaatatgtactcaactaggacgtctcctcacccacgttaattttttaaagaggaggaaagtaggagaagatgagcgcttcatgtaaggctctgccagcctacgaggaaatgcaatcctccaggctcgcccgagcgtgggctgcgggcaggggactgtggggccgttgtctcgttttattccacggccgtgcagcagagggcgcgtgcctctcagcactcatgctgcgcgctcccctgcgcctctaggatcgtatccctatttgccccaaggtcatagctcctaacccagcttgccagccccaggccggggacaccagagactgagcccttcgcgctggagaccccggcgcgggtggggcgggagggctccggggccaagagacaggtcacaatggggacaggggacgaaaggcgccgggggtccgggtcccgagcagtccccgccgccgccagactccgcagccgggagggggatggggtgcgcgtagaggctccgcggcccgggttggacggaggagcccaggagccaccgcagccgccgcacgcccagagctccgagcttcgctgccagcccaggacaccggggccctgccgtgggccgaggggagccgggcggcgggagaggagccccggagccccggagccccggagccccgccgggcgccagccgagagggcgttttccccgcccccggagactcgcccgcccggcccgccccgccccgagcgcggggagttcacctccgcccgtcaccacctccccttgtcgcctaggtccacccgagccccctcccccgggccgcccccgagcacgaagttggcgggagcctataaaagctggtgccggcgcgacccgcggacacacagtgcaggcgcccaagccgccgccgccagatcggtgccgattcctgccctgccccgaccgccagcgcgaccatgtcccatcactgggggtacggcaaacacaacggtgagtgccggcgacggccagcgcgggggcgccccgatccccgatccccgatccccgatccccgagcccggatgccggcccggggcccgcagcgcccgcacatgctgtttaccgcggccgcggggagtgctggaggctcaggtgcgccccgggcgctcgctccgctcgcggctccgcggcgccggggatgtcccccttgccccagctgcgaggccactgtggaggaatccccgcgtccgccggaggcgcgtagggcccgagggaggggaggcgcagccctggccgcgggacccgaggacagtccctcccgggtcccgacctggggatcattttaaccggacctaggaggaggcgggaaagggttgtaacggaaaattctagttgttgatcgcagagaaattaagagactcccctcccccctcccccaccttccacccccaccccacccctccagcttcagcaccacctgtggctaaggcgctcagcacgaactgtcccgg

SEQ ID NO: 166 - DNA, 86563 bp, Homo sapiens
ctgcagccatgggtgccctatggagctggtggatactctgggctggagcaaccctcctgtggggtaagtcagaccaagaccctctccatgtccttgttccaatctggggaactctgcgtgggtccacgccttccatgtgtgcctcctccacatgtcaccccaggctagctgagacaggagagaggcccttaggctctgcagggggatgtggtagaattcaccaattctcacccttttctggatgggagcacaggcaaaaaccttagtccccaaactcaagtgtgcaagaactttcttggttttctgcaactcaactaaggttttgactctgagcctcattctgctaagttgatggaaaatttcacgaaagtcattcttggagggtgttgtccccacttctcccagggatgtgtccagaactaaaattttggataaagccaaagtactggggggaggatgggatatgaggaccctctcgtcaccagtcagcatccatctaggttacttttgaaatgtccattgttcctgatcccctggccccctgggatatccttcaaagccccctttatatggaaggtggtcattccatagcccccacactctcttcaagattccttagacctctctctcctcagccccagggacgctcttcctagttgggggtggtcagaagcccccactgccatctatttctaggagacaattcattcacccttccataatccccttcttctctttatccccttttcacaaacccccaagtcccattattattattattattattattattattattattatttgagatggagtttcactcttgttgcctagactggagtgcaatggtgtgatctcagctaattgcaacctccacctcctgggttcaagcgattctcctgcctcagcctccctagtagctgggattacaggcgccccatgccaccatgtccggctaattttgcatttttagtagagatggaatttcaccacgttggtcagtctgctcatgaactcccgacctcaagtgatccacccgcgttggcttcccaaagtgctgggattacaggcaagagccaccgcgcctggcccccacaagtcctattaagacaaaaaccagctgggtacagttggtcacgtctgtaatcccagcacttcgggaggctgatgcaggaggatcacttgagcccaggagttcaagaccagcttgggcaacaaagtgagaccctgcctctagaaaaaaattaaaaaatgagccaggcacacagtgcgtgcctgtggtcccagctataccagaagctgagacaggaggatcccttgagcccaggaggttgaggctgcagtgtgttgtgtttaagccactgcactccagtttgtaaaaagatggaaatcatacactggcagcagagtacatccaccttgagccccaaagtgcttaaaacaattgtgggttggagatttcacatgaaaattcagatagccacattctctttaaaaacagaaagaacggccaggcgtggtggcttacgcctgtaatcccagcactttgggagaccgaggcaggtggatcacctgaggtcaggaatttgagaccagcctggccaacagggtgaaaccccatctctactaaaaatacagaaattagctgggcgtggaaaccgggaggcagaggttgcagtgacccaggatcgcgccactgcactccagcctgggtaacagagtgagactccatttcaaaagaaaaaaaagaaaaaatacaaaagttaactgtgcctggtggcgcacacctgtagtcccagtactcgggaggctgaggtggtagaatcactcgaacctgagaggcagaggttgtggtgagccgagatcgtgccactgcactccagcctgggtgacagagcgagactccatctcagaagaaaaaaaaaaagaaaaacaggaaggtcttacaatttaaaaaagctcacattctttcattataacaggtgaaagctagtaccaacaatccactttttttttttttactagtttatatatttttaaaatttttaatttttatgggtttgcatttatggggtacctgtgatattttgatacaggcatacagtgtgtaatgataaaatcagggtaactagggcatccctcacttcaagcatttgtcatttctttgtgttaggaacattccaattccactctcagttattttaaaatataccataaattatcgtcaacaatagtcatcctgttctgctaccaaatactagattttatctattttatctaactgtttaactgtatttttgtacccattaaccatatctacttatcccccagtccccgctacactttccagcctgtggtaatcatcgtaaccatcattttactctctatttctatgagttcatcagttaaaaattttaaattcccatctatgagtgagaacatgtgaaatttgtctttctatactggcttatttcacttaacatcatgtcctccagttccatccatgttgttgcaaatgacaggatctcattccttttttttttttttttttgagaccgagtctcactctgttgcccaggctggagtacagtggcgcgatcttggctcactgcaacctccgcctcccaggttcaagtgattctcgtgcctcagcctcccgagtagctgggattacaggtacatgccaccattcctggctaatttttgtagttttggtagagacagggtttcaccatgttggccaggctcgtcttgaactcctgacctcaagtgatccacctgccttggcctcccaaagtgctgggattataggtgtgagccactgtgccgggtgatctcattcttttttatggtggataattctccattgtttgtatgtaccaaatttcctttatccactcatctgttgatggacacttaggttgattccgtatcttggctattaggaatagtgctgcaataaacatgggagagcagatgtctcttacatatactgacttcctgacttggaaggaaaggaattgctggatcatacagtagttctagttttagttttctgagaaaccttcatattattatcgatagtgattgtactgatttacattcccaccaacagggtaacagggttcccttttctccacatgctcagcagcattcattactgcctttcattaggataaaagccattttaactcgagtgagatgatatctcactgtggttttaatttgtgtttctctgatgattagtgatgttgagcattttttgatatacctgctggccatgtgtatgtcttctttgagaaatgtctattcagatcttttgcccattttaaaatcagattaatccgggcgtggtggctcacgtctctaatcccagcactttgggaggccgaggcaggcggatcacttgaggtcaggagttcgagaccaacctggccagcatggggaaaccctgtctctactaaaagtacaaaaattagccgagcatggtggcgcatgcctgtaatcccagctacttggaaggctgaggcaagagaatcacttgaacccaggaggcggaggttgcagttagctgagatcgtgccactgcagtccggcctggggtgacagagtaagaccccatctcaaacacacacacatacacacacacacacacacacacacacacacaaatcagattatttgatttttttcctattgagttgtttgagctccttttatattctggttattaatcccttgtcagtaccatctagaaatgctactgatttttgtatgttgattttgtatcctgcaaatttagtgaatttgtttatcagttctaatagctttttgatggcgtctttaggttttttttaaatatcagattatatcatctgcaaacaaggataatttgacttcttttttttttttttccagtttggatgcctttatttctttctcttgtctaattgctttagctaagatgggttgtatatattttctcttattctgtcagttgtgtcttcactttgtggattgtttcctttgctgagcagaagctttttaggttgatgtgatcccatttgtccatttttctttggttgcctgtgcttttgatgtattacttaataaatttttgcccagactaatgaactggagagtttcccaaatgtcttcttgtagtagtttcgtagtctgaggtcttagatttaagtctttaatccattctgatttgatttttgtatgtggtgagagataggggtctagtttcactctttgcatatggatatccagttttcccagtaccatttatcttcaataaatgcaatgtatgttcttgggatctttgtcaaaaatgaattcactgtaggtgggtggatttgtttctgggttctatgttctgttccactggtccatgtgtttgtttttatgccagtaccacactgttttggttattatagttttgtagtataatgtgaagtcaggtaatgtgattcctccagttttgttctttatgctcaggatggcgttagctattctgggtattttgtgtttccacacaaattttgggattagtcttctatttctgtgaagaatgtcactggtatttttatagagattgcattgaatcggtagattgctttggttagtatggacattttaacaatattgtgtcttccaatccatgaacatggaatatctttccattttttttggtgtgtgtcctcctccatttctttcattactgttttatagttttcattgtagagatctttcatttctttcgtttattcctaggtgttttattttatttgtggctattgtaaatgggattactttcctttttttttttcagattgtttgctgtaagcatatagaaatgctactgatttttgtatgttgattttgtatcctgcaagtttagtgaatttgtttatcagttctaatagcttcttgatgaagtctttaggttttctgttttttttgttttgttttttgttttttgttttttgagatggagttttgctctcgttgcccaggctggagtgcaatggtgccatctcagctcggtgccatctcagctcactaccatctctgcctcccaggttcaagcgattctcctgcctcaacctcccgagtagctgggattacaggtgtctgccaccatgccaggctaattatttttttgtatttttaatagagacaggttttaccacgttggtcaggatggtctcaatctcttgacctcttcatctgtgcagctcagcctcccaaagtggtgggattacaggcttgagccactgcacccagccaaagttgtttttttttttgagacagagtcttgctctgtcatccaggctggagtgtggtggtgtgatcttggctcactgcaacctccacctcctgggttcaagagattctcttgccccagcctcccgagtagctgggactacaggcatgtgcaactatacccagctaatgtttggtttttttttagtagagattgggtttcgccatgttggccaggctggtcttgaactcctgacctcaggtgatccacccacctcggcctcctaaagtgctgggattataggcgtgagctaccaagcccagctgtcttcaggtttttctaaatataagattatatcatctgcaaacaaagataatttgaatgccctttttccagtttggatgccctttatttttttctattgtctaagtggtttagctaggactaacaataatatgttgaagaatagtggtgaaagtggacatccttgctgtgttccagatcttagagcaaaggctttcagtttttccccattcagtatgataccagctgtgggtctgttgtacatggatttcatcatgttggggtgtgttccttccgtgtctactttcttgagagtttttatcacgaaaggatgttaaattttatcaaatgcttttctggcatcaattgaagtgatcacatagtttttgtcctttattctgttgataagatgtatcacactgatggatttgcataagcaacaacccactttagatggtataggagtgcttcagttccacagtcgcccctccgggactgtttcacacatttatatttcttgcctggccccatcagcattggagtttgagggccctgtctaaggtgtttagatttttgaaaaacaaaagccaggaaggcttgtagacgaaagctgcatgaatcagaagaaaggaaagagaagggtggtgggggaaagcccaagttaatacttcaacatgtttctgggtgcagagcaaaagtggggaggattggataagtggacccacaactgtattttctcaaccaggattgacccaggaggcttcagtggacctcaagaacactggcagagaggaattcctcacagccttcctgcagaactatcagctggcctacagcaaggcctacccccgcctccttatctccagtctgtcagagagccccgcttcagtctccatcctcagccaggcagacaacacctcaaagaaggtcacagtgaggcccggggagtcggtcatggtcaacatcagtgccaaggctgagatgataggcagcaagatcttccagcatgcggtggtgatccattctgactatgccatctctgtgcaggcactaaatgccaagcctgacacagcggagctgacactgctgcggcccatccaggccctaggcaccgagtattttgtgctcacaccccccggcacctcagccaggaatgtcaaggagtttgccgtggtggccggtgccgcaggtgcctcggtcagtgtcacgctgaaggggtcagtgacattcaatggcaagttctatccagcaggcgatgtcctaagagtgactctacagccctacaatgtggcccagctacagagctcagtggatctctcggggtcaaaggtcacagctagtagccccgtggctgtcctctctggccacagctgtgcgcagaaacatacgacctgcaaccatgtggttgagcagctgctacccacgtctgcctggggcacccactatgtagtacccacgctggcctcccaatctcgctatgatttggccttcgttgtggccagccaggccacaaagctgacctacaaccatgggggtatcactggctcccgtgggctccaggcaggtgatgtggtagagtttgaggtccggccatcctggccactctacctgtctgcaaatgtgggcatccaggtcctgttgtttggcacaggtgccataaggaatgaagtgacttatgacccctacctggtcctgatcccagatgtggcggcctactgcccagcctatgtggtcaagagtgtaccaggctgtgagggcgtggccctggtagtggcacagacgaaggctatcagcgggctgaccatagatgggcatgcagtgggggccaagctcacctgggaggctgtgccaggcagtgagttctcgtatgctgaagtggagctcggcacagctgacatgatccacacggccgaggccaccaccaacttgggactgctcaccttcgggctggccaaggctataggctacgcaacagctgctgattgcggccggagtaagtaatggaaatgtcccctggtcctgtccacctggtgaccgcttttccacccacctactcctctgtggctttcgggatcctgattgtcctcccctcacttctcttctccgcgacatccttcctcaagtcttctcagcccctcccatccgcccagaaacaatattctaaatatttagcaaccagggagagctggggcactaccagtcagaagagacagcagccaaagcactgtgacagggtcctgaagcccccatcatgctggcatcagcccctgtctgttggtttgttctggaaagggccctaggggagagccagggtgctgagaaggagggatctttggggttgtgggggacagtcaggtcagcagcttctcaccaaccagtttggaaatattttgatattttagcaactgacatagccacaccagttgctaagccactctccacacctcatgtaggaatgttgatacccaaacttaggagatctaaatgtatgataataagatgactacgcgttggggaggggagtatcttgcaatctttctaggtgtttcacgtgtttttgacacagttaatgtatatgacctggcagtttgtgtgacctcaggctcagcccatgagacgctgtcagtgtagtgcagggtcccagggttcaaatcccagctctgctgtgtgatcttggacaagtgacttcatctctctgggcttcagtttccacatctgtaaaatggggataactgtttctccctcaaaactttgttttagagacagggtgtcactctgtcactcgggctggagtgcggtggtgtgatcacagctcaccgtagcctcgaactcttggactaaagcaatcctccctcagcctcccaagtagctgagactataggcatgcaccaccacacccagctaatttttaatttatattttgtagagatagggtctttccatgttgcccaggctggtctcaaattcctgggctcaagcgatcctcctgcctcagcctctcaaagggctggaattacaggcctgagccaccacacccagctgcaaaaacttttgaggactgggaggcagatggaggaaagctgtttcttcccatgtagtccctgccacgctaagactctggcattcctggacctggcaaaaatgcccctcccctcccctccaaggcatggaagccacccaacttcaaggagccactttgggcttgagaaatagaatgagggagcggtgggtgattaattataatgggtaacactccacttaacacgtaggttcagttctaaagctttctcgagttttagcttatttaatcctaacaccccccaccaagatccctacgaaggaggtattattatcacccccatgttacaaatgaggaaactgaggcagagggagtttaaaaccacttgcccagtgtctcagagccagttggttgagccaggattcctacctaggcggcctgactccatagtccttttcatcctgctgaaggctgtcttccattttctgtccttaaaaaaatcccttagctctttttgaccctggagggaaggtagggaagaggggaaaagggggagagaaaaacacaaattaacattttaatgaccgtttctgccttttcttatttactgccttcccttcttctaggctgccctgtgttaaactggagaatcagaaaacatggggctctcagagaggcctgagcaactctctccctgtggggttccagacctcggtttccccacctttaaaatgggcaaaaatgggcaaaaatgggcagttgtgagcgaattgctcaagcttccccggcaaggtgggctccaggatgcctccctctgaggcctgaggcggtttcttccttcttccttcttcttccctcctcctcctcctcctcttcctcctcctcccccttccctcttcttcttcttcttcttcttcttcttcttcttcttcttctttcttctttcttcttcttcttcctcttctttcttctttttttctttgtgagacagagtctcactttgtcacccaggctggagtgcagtggtgccatctcagctcactgcaaccttcgcctcctggggtcaagagactctcctgcctcagcctcccaagtagctgggattacaggcatgtgccaccatgctctgctaatttttgtgtttttaatggagatggggtttcactatgttgggcaggctggtctcgaactcctgacctcaagtgatccgcccccctcaccttggcctcccaatgtgctgggattacaaccccgcggacacttctgattctctcttttcaccgttcccttccctccccagctgtactgtccccagtggagccctcctgcgaaggcatgcagtgcgcagccgggcagcgctgccaggtggtaggcgggaaggccgggtgtgtggcggagtccaccgctgtctgccgcgcccagggcgacccccattacaccaccttcgacggccgtcgctacgacatgatgggcacctgttcgtacacgatggtggagctgtgcagcgaggacgacaccctgcccgccttcagcgtggaggccaagaacgagcaccggggcagccgccgcgtctcctacgtgggcctcgtcactgtgcgcgcctacagccactctgtgtcgctgacccgcggtgaagttggcttcgtcctggtgagtacctgggggctttggggggttaacatccatgagctgcgggtccgaaggcggaggcaaagcccaatggccgacctcaaaccagggtgcagggaagtgggccatggagttggagggtggggaggcggatttgaaaatcagtagcaggaccttagaaccctgccctccagccatcccacgtctagaaatttaaaggatattcagagacagagactggggggtaacatgccaacatggtttataatagcataaaacaaaaacaaacaaacaaaaaattatccagcaatgggggatttacgttgaccaaataactaaatttaatgagcacctgctatgcaccagatatgtttcttagcacttttctcatcttaacgaatttaatgctcacaaactcagtgcaggaggcattattattatgaacatgttcagattgggaaactgaggttgagataggctagtgacttccccagggctcagagctagtaagaggtggagctaagggcacaggcatgctggctctggagtccttgttcttaatccctcagctgtcctgactctggtaaatgcatttctattcagttcatatgaataacagcagcctagagcaattacttcctttttctcgccatgttattatgaaaatattaaaatgtccaaagttgaaattcttatacagtgaatgctcatatgccaatcgcctagagttttctttctttctttctttcttttttttttttttttttgagatagagtcttgctgtgtcacccaggatggagtgcagcggcaggatcaggttcaagcgattctcctgcctcagcctcccgagtagctgggatgacaggcatgtgccgccatgcccagctaatttttgtatttttgtagagaggggtttcaccatgttggccaggctggtctggaactcctggcctcaactgatcggcctgcctcagcctcccaaagtgctgagattacaggtgccaatcatctagattctaaacactgtactcttcttgattgatcacacactgatccatcggttcatccctctgtccattccacaatctctcttattttttatgcacttcaaagttccagacatgagtacatatcacccaaaagacttcaccatgtcattaactagaatataatattttcacacttcttttggctgattttggaggtgaaatttatatataacaaaaatcacaaatcttaactgtatagttcacctttggcaaatgtgtaaccaaattgcccattaagatacagaatatttttatcacctgggaaaattccctcatgtgccttaccaaacagtccccaacctactcctggagatgatcacaattctgattttttttttccagcatagattagttttgcctgttcaataacttcagggccaggcgcagtggctcatgcctataatcccagcactttgggaggcctaggtgggtggatcacttgaggtcaggagttagagaccagcctggtcaacatggtgaaaccccatctttagtaagagtacaaaaattagctgggcgtggtggcgcatgcctgtaattccagctacacgggaggctgaggcaggagaatcgcttgaacctaggaggcagaggttgtagtgagccaagattgcaccactgcactccagcctgggtgacagagtaagactctgtctcaaaaaaaaaaataaataaataaaatatatatatatatagagagagagagtatatatgtgtatatatatatatatacatatatacacacacatatatacatgtatatgtgtatatatatgttgtgttctctactttgctttttgcatttagcaatacattctgaaacagtttctctatcaacagtttctctatcagcctctatttttttttaacatctgcacaattctttatatggatatgaacaccatggttcattcaaccagtcccctgtggatggacacattgttcactattacaaacaatactgcaatgaatatttttttgatttttttttttttgagacaaggtcttgccctgttgcccaggctgaagtgcagtggtgtgattatagctcacttcaacctcaaactcctgggctcaagcaatcctccagccttggccttccaagtagctgggactacagtctcatgccactatactgggctaagtatttttatttttagtagagataaggtcttgctatgttgcccaggctagtctcgaactcctggtctcaagtgatcctcccaccttggcctcccaaagttctgggattagaggcgtaagcccctgtatctgacctgaaataaatattcttgtacctccctgattttgtgagtgtgcaggtagatctctgcgattaataatcagttggtgaaaggaggtgttcttcagccctggaggggttgagcacaagttcaggcggacttcagatcccttgaaattatatacagaattttatacctctctctgaaaactactttttattttttttgagacggagtctcgctctgttgcccaggctggagtacagtgacgtgatctcggctcactgcaacctccgcctcctgggttcaaacgattctcctgcctcagcttcccgagtagctgggactacaggcacatgccaccacgcccggctaattttttgtatttttagtagagctggggtttcattgtgttagccaggatggtcttgatctcctgaccttgtgatccgcccaactcggcttcccaaagtgttgggattacaggcatgagccaccgcacccggcctttcatttttttttccgtcagatcctcacagaggtcagtgacttgacaaaggtgcagagctactgtcagaatcatagtaggatactcacaagacattgttaggagaggagttaatgaaatagtgacttcagcatggtctttttttttttaagtgtaaatatatctaaaggtaggaaaaaactcaacaggatctatacatttgtatgtgtctgcctacagggtgattttcttttctcatttttgctcctgtgcattttcagttttctgtaatgaacgaatattatttgtgtcatttaaaaatggagattggctgggcatggtagcttacgcctgtgatcccagtactttgggaggctgaagctggaagattacttgagcccagaaatttgagaccagcctgggcaacatagggagaccctatctctaccaaaaaaaaaaaaaaaaaatagctgggtgtggtggcgcctgcctatggtcccagctacttgggaggctgaggcaggaagatggcttgagcccaggaggtcgaggctgcagtgagctatgatgctgccactacactccaggctgggtgacagagcaaaactgtctcaaaaaaatacataaataaaaaaatagaaaaattaaaatggagatcactggacttaggggagaaacagatttgagcagccatgctggactgagagctctgagcatggggccatggcctgtctccatcactgcagtgtctaaagcaccagctggcacagagcaggccacacagtgggactcacagaagctttgctgggagccggaatgagtgaatgctctgtcttccttctgggccattgctcatgctgtcctctctcctgttgctccttttatcatattccatcctcttggctaagacttctccacttcaagtctcagctctggcacagctcagagaatgtgtaaggaaagagtaagaaagagatgcccaggctgggtgcggtggctcacacctataatcccagcactttgggaggccgaggtgggaggattgcttgagccatgagctccagaccagcctggacaacatagtgagacccccatatctaatttaaaaaatttttttattaattaaaaaaaaaaaaggctgggtacggtggctcatgcctgtaatcccagcactttgggaggctgagcaggggtgggcagatcacttgaggtcaggagttcaagaccagtctggccaacatggtgaaaccctatctctactaaaaatacaaaaattagctggacgtggtagcaggcacctgtaatcccaggtgggagaatcacttgaacctgggagacagaggttgcagtgaaccgagatcgtgccaatgcagcccagccttggtgacagagcaagattccatctcaaaaaaaagatgccccagggcacagagagacatagttcttatctcctggttcttagtcagacttcaggcttctccagagcctgggaggcttataaacaacacaacctcgtctctgtgttctggaggctggaagtccaagatgaggtcaccagcactgccaggttcaggtgagggtgctcttccaggttgcagatggcctacttctccttgtatcctcacacggtggaaagcggatctgagagctctctgaggcctctgtcataagggcactaatcccattcatgagggtgccaccctcatgacctaatcacctcccaaaggcctccccccactcttaataccatcatgttgggtgttaagatttcaacatccctgaccagcaaggttagatctggccatttttctaggttttcacagcctcctatctccccactatcccagctctgaaccctcagcctgtacctcccctatcccatccttgacccctctgcctgggcctttctgatcctggccttgacttttctgcctgtgcttctcccatctctgccctgacccctctgagctctcactgtctggtgatgtgtctgtttctcccaatggactgggagccccatgagggtagggcttggggctgtctccgccaccttcgtattcccaggatctcccagctcaaggccaggcacagagtgagtgcccagtgaatgtttattaaatgcagcagtgacttaattcacttagtgagtgcctgggattctaccaggccctgttctatgcactggggataaagcagtgatcaaagcagacccaaacccttgtctttgtggagctgccattctgatggagtaagacagatgataaacatggtcaatttgtgaattatatttcagaaggccagatgctatagaaaaaaaaggaaagcagggaaggaggctatggaatagggagaggctgccttttttttttttttagacagagtctcactctgtttggcacgatcttggctcactgcagcctccacctcctgggttaaagcaattctcctgccccagccaactgagtagctgggattacaggcgtgccccaccacacccagctaatttttttatttttagtagagacagggtttcaccatgttgaccaggctggtctcaaactcctgacataaagtgatccacccgcctcagccttccaaagtgctgggattacaggtgtgagtcactgcgcccggcccaaggctgccatttaaaaaggggtgtaggctgggtcccatgggtcatgcctgtaattctagcactttgggaggctgaggcaggaggattgcttgaggccaggagttgagatcagcctgggcaacatagcaagacctcatctctataaaacaaaacaaaacaaacaaaccataaaataaaatcataaaatagggcagtcagggaaggcttgagtcagtgacgtttgagcacatactctttttctatattctcctatttaaaacttttaattaaaaagtactttaatgagggctggaggccagatggcacaggggcctgaccacctcctcttcacccactctgcaggttgacaaccagcgctcgcgcctgccagtctccctgagtgagggtcgcctgcgtgtgtaccagagcggaccacgggccgtggtggagctggtctttgggctggtggtcacttatgactgggactgccagctggcactcagcctgcctgcacgcttccaagaccaggtgtgcgggctgtgtggcaactataatggtgacccagcagacgacttcctcacgcctgacggggctctggctcctgacgctgtggagttcgcaagtagctggaagctggatgatggggactacctgtgtgaggatggctgccagaacaactgtcccgcctgcaccccaggccaggcccaacactatgagggcgaccgactctgtggcatgctgaccaagctcgatggccccttcgctgtctgccatgacaccctggaccccaggcccttcctggagcagtgtgtatatgacctgtgtgtggtcggtggggagcggctcagcctgtgccgtggcctcagcgcctatgcccaggcctgtctggagcttggcatctcggttggggactggagatcaccagccaactgccgtgagtgatgccctgggtgggggctgggagcatacagtgaggggcaggagatccctagcatctgcttaatatctgagaagttattatggttcagcctggtgctgggcaatgccaggggcctagtgatggccaagacagccagctctgtccacaatgagcctaaggttggagagacgtttcactagacattgacagtctggaggggtccaggcaggatggggaggcccactcggatgggttggggccaggatgggagagagacaggcagatgagtcagggctgggattgcgggggacacaggcagaggggttggggccaggatggaggaagtcagtggggctatgggaaaccagaggaggttcctggcccagcctggggagcaggggtggtcagggagggttttctagagaaagatgtccaatttgaaacccataagaggggctggaagttgccaagagaaagaggaggaagtgagttgcaggcccagagaacagcatgctcaaaggcttggcaggacgggaattcttgtctgcagaatcccaacacagagacgtgacgtctcttcctttgcctatagccctcccatgactcccattgccctctagataaagtccaggctctttagccaggtgtccgtctgcttaatcgttcactcattcattccacaagcattccttgaacccctgcctgccccctgtgcatgctaatgatattgaagacacagtgaagaccagcataaatctattcctgcccttgtgagtgaggctcctagagacatgtcccagaggcagaaaggacaggtaggagggaggaagaggcatccaggcccaggcccagagggagggggagtaagtacagggcagacatagaggccactaggtgtttgtcttggccagttctgtgtccccactgcccagtaagcacccccccaaccccatgcctggcgcaaaataggaatcagagagttcatttattctccctttcacttctgcagtatttcctgagcacctgctgcgtaccaggccctgtccttggtgctggggactcagcagtgattgagacagatcaggtccccactcccgcagaacttctctcttagcggcaggggagggacacagacagtgagcagatgaactaggaagtatcttcagagaggcaaagaaacaagttcattcaatgacagtgactgtgaggctcgtgaagagggtgatcagggaaggcctttctgggcaggtaacattggagctgagaccagggtcaggcaatggagtcagctaagtactaactaacagtgatgtccacagaatgtttccccatagatcaactcatttaatcctcacaacaaccctgtgaggtctcgactacattatcccatcttactgatggggaaactgaggcacggggagattggagtcagtggccgagaaggagagatctgggatctgaacccaggccacctgggccccagtgggctttctggggaaagggaaggcagagggaacagccaatgcaaaggccctgaggtgggagggtgaggacccgggaggaggaggcagctggggctggggcagagtgagcccgagggagagggagaagaggtgagggctgagaggtgagaggaacagatggcacagggcctcctgaggcatggggaggactctggcgtttaccctgagtgagaggaagccacagtagtgctctgagatggggagggacctgatctgacccagatgttcccagattcctcggcctggtgtgaggaacaggctgtgggggcaggagggagcccaggcaggaggctgctgcggtggataggatcagaggcagattctgtaactgggtggatttttttttttttttttgagacaaagtcttgctctgcgcccgggctggagtgcagtagtgtggtctcagctcactgcaacctccgccttccgggttcaagcgattctcctgcctcagcctcttgagtagctcggattacaggcctgcgccaccactcccggccaatctgggtagattttgaatatggagctcacaggacttgctgacagattggttgtccagtgagcgttagggggttggcggggtggagattaactgcgtcgctggggtgtggcgcaggagcacccagaagaatggcagtgccattatctgagatggcgagctctgagagaggagcagggtttggggatggaattcctgggcgccgtccccgacagggcgctcttcgacggcccctgctacgcgggcctgatccaccctctctgatctccccgcagccctgtcctgccctgccaacagccgctatgagctctgcggccctgcttgcccgacctcctgcaacggggctgcggcgccgtccaactgctccgggcgcccctgcgtggagggctgcgtgtgcctcccaggcttcgtggccagcggcggcgcctgcgtgccggcctcgtcgtgtggctgcaccttccagggtctccagctcgctccgggccaggaagtgtgggcggacgagttgtgccaaaggcgctgcacctgcaacggcgccacccatcaggtcacctgccgcgacaagcagagctgcccggcgggtgagcgctgcagcgtccagaacggcctcctgggctgctaccccgatcgcttcgggacctgccaggggtccggggacccacactatgtgagcttcgacggccggcgcttcgacttcatgggcacctgcacgtacctgctggtcggctcatgcggccagaacgcagcgctgcctgccttccgggtgctggtggaaaacgagcatcggggcagccagactgtgagctacacgcgcgccgtgcgggtggaggcccgcggggtgaaggtggccgtgcgccgggagtaccccgggcaagtgctggtgagcgacgtggcgcccagggctgggtgacggagcaggaaataccctctgaagacttggagttctggatgggcctgagggtgggggaggcctgttagaagattttatttttttcgttttcctttttcctttttgtgcagaacggagtcgcactaagttgcccaggccggtctccaactcctgggctcaagtgaccctcccgcctcagcttcctgaagtgctaggaagtgagctatgatcgtgccactccattctggcctgggtgacagagtgagacccctgtctctattttaaaaaggaagctagtggctgggcaccgtggctcacgcctgtaatcccagcattttgggaggctgaggcgagtggatcatctgaggtttgagaccatcctggccaacatggtgaaaccccctctctactaaaaatagaaaaaaaaattagccaggtgcagtggctcacacctgtaatcccagctactagggaggctgagagagaatcgcttgaacccaggaggcagaggttgtagtgagccaagattgtgccactgcactccagcctgggcaacagagtgagaccctgtccaaaaaaaaaaagaaaagaaagctagtatggttgcagcagcctgagtgagagggacagtgagaagaggtgaggcgagggaggtaatggggagatagacagatcatgtaggttttgaaggccatgggtgagggatttggatttaagctggtgctttaggaatgaagaggggtgaatggtgagccaggcagagggaacagcaagtgcaaaggcctcgaggtgggactgagcgtaatatgtccaagagaatagcaaggaggtcagggtagctggaggtgagtgaattgaagggtgggccacagaactgtgaataccctgaccaggtggccctcttgcatctccacccaggtggatgacgtccttcagtatctgcccttccaagcagcagatgggcaggtgcaggtgttccgacagggcagggatgccgtcgtgcgcacggactttggcctgactgtcacttatgactggaatgcacgagtgactgccaaggtgcccagcagctatgctgaggccctgtgtggactctgtgggaacttcaacggggacccagctgatgacctggctctgcggggtgggggtcaagctgccaatgcactggcctttgggaacagctggcaagaagagacgaggcccggctgtggagcaactgaaccgggtgactgtcccaagctggactccctggtggcccagcagctgcagagcaagaatgagtgtggaatccttgccgaccccaaggggcccttccgggagtgccatagcaagctggacccccagggtgccgtgcgcgactgtgtctatgaccgctgcctgctgccaggccagtctgggccactgtgtgacgcactggccacctatgctgctgcatgccaggctgctggagccacagtgcacccctggaggagtgaagaactttgccgtgagtatcggaagtggcaactgggggactcagccttatatatattcattaatgtataaatatcattaattcatttaatccttataatagccctatgaggtagggattgtggttatacccatttaacagatgaagaaattgaagttcagaaaggttcagttacacacctgggatcatgatagctagaaaatcacagatggtgggcatgcagttggtattttttttttagatggagtcttgctctgtcaccaggctggagtgcagtggcatgatctcggctcactgcaacctctgagtctggttcaagctattctcctgcctcagcctccagagtagctgggattacaggcatgcgccaccaagcccagctaatttttgtatttttagtagagatggggtttcaccatgttggccaggatggtctcgatctcctgaccacgtgatccgcccacctcagccttccaaagtgctgggattacaggcgtgagccaccgtgcccagcggcagttggtatttgtaaaatgactgagtacacctggtggcccagggtctgattcccacataacagctgtcattgagatatgagcaacagtattgtcattaggagtctcatcccctctctggttctttttggtccccatctatcctacctcgcttatttacatctgcctgaccccttgggcagtcagtttgagagccttgtttcagaggtgggtgcatgaatggttttccaacacctttgcttgcctatgaaagaagtttgaaaagccatgcatcctctcacctgattttttttaagatggggtcttgctctgttgcctaggctggagtgtagtggtgcaatcatagcttactgcagcctggaactcctgggctcaagcgattctcctgcctcagcctcctgagtagctgaaacggcaggcttgcaccaccatcccccgctaatttttaaaatattttttatagagacagggttttgatattttgcccaggctggtctcgggctcttgggctcaagcaatcctcctgcctcggcctctcaaaatactaggatgacaggtgtgagccatcgtaccagtttcctctcacccgatttttaatttaaaaaatttattattgaaatataatacagatatttaaaaatatgtacatatcataagctaacagcttgatcagttttcaccaagagaacaaacctgtgtgaactgtcccaaattcaagaaaaaaaaaaaatccaggttcccaaccccaagaggtaaccactattctgacttctaaagtttttgaattttggaattaatagaagcatacatgtctagtttttcacctgaaataatcataaaacttataatttctaacaaatggtaacttttgacttttaagaacctttttttttttttttttttgagatggagtctcactctgtcacccaggctggagtgcagtggcacgatctcagctcactgcaacctccgcctcctgggttcaagcaattctcctgcctcagcctcccaagtagctgggactacagacgcccgccaccatgcttggctaatttttttggtatttttagtagagagggggtttcaccatgttggccaggctggtttcgaactcctgacctcaagtgatccgcccaactcggtctcccaaagtgctagaattacaggcgtgagccactgctcatggccttaagaacatttttattagggaaaaatttaaacatatccaaagtaaactaggatagtgagccagcatatatccatcatttagtttccacaattatcaacataatattggtatttcaaaatgaaaccattacttgacttatgctcctcttttaaatgtattcaacagatacatagcacacagtggtacacatcattgtccactgaaaaatacaggataaatacatcattcctttttctccttcaacttacattcattcattcaacaaatatccaaaacattcaaaaataccttctgtattccaggcactattctaaacactccggatacaataggggagagaataagaaaacaaatccttgcctttctgaactgattttctaatgctttttagttctaacagaatttaacctaatgtaacacatttgaatgcatggaagtcttttgttaaagtcactgtatcagctggcttttggtgcctaacaaacaacccaaggcttagtggctgagtgcattaaaacaagtgtttatttttatttatttatttatttatttatttatttattgacatggagtctcgctctgttgcccaggctggagtgcaatggtgtgatctcggctcattgcaacctccgcctcctgggttcaagtgattcttctgtctcagcttcccaagtagctggaattacaggcatgtgccaccatgcccggctaattctttgtatttttagaagagatgggggtttcaccatgttagccaggctggtctcgatctcctgacttcaggtgatctgcccgcctcagcctcccaaagtgctgggattacaggtgtgagccaccatgcccggccaagtatttattctttctcatgattctgggggctgctgagctgttctcccagcctgggccagcttggttgatctctgcagtctgttggaggctcagccaaggccgggtaatctagggtgattttacacatctggcagttgtcaagctggttggtttggggggccctcagctgggaattcttgtctctgctctacttggtctcatcttccagcaggtgagccaaggcttcttcccaaggtgctctcaagattcctaagagcacacaagccccagtgtgcaagcactttccaaggctctacttggtatcatggtggccaatgtcccattggccaaagcaagtgccatggtcatgcccagagtcaagacgtgaccattggcagcctgtgtcacaatcgccatcacacttctctgccacaaacatacacatctatgactaagatttcagaatttttataatcccagctactcgggaggctgaggcagaagaatcgcttgaacccaggaggcagaggttgcagcgagccgagatcaagccactgcactccagcctgggcaacagagcgagattctgtctcaaaaaataaaataaaataaaataaaataaaataaaataataacagtgcagtctccactcatcccaaatctcaacacgtggcatgttgccctggggtgtgaaacctcccaggacaaaacagccttcttataaaagatataagaagttttagaaattcctgagactctaagactctaagtggtttttttaatggagtaagatatcattgcaagaattgtttgtgcacaattgataaaaatattaaacagaagtaaattgtaatggccattgtaatggcatcactcagtgagcttacccccacccaatatttcacatatattgttagaatgagacagggttcagcatcaattctaatcctatctttcatttttgtagatatgatatttatttatttttgagataaggtattatcctgtcaccgaggctggagtccagtggtgtgatcacagcttactgtagcctccatctttgggctcgagtagtcctcctgtgtcagcctcctgagtagctgggactacaggtgcacactaccatgcctggctaattttttattttttgtagacacaagatctcgctatgttgtccaggctggtctcaaactcctgggctcaagccttcctcccgccttggcctcccaaagtgctgagattacagacttgagccacagctcctggcttacatgatattaataagtgggtgggagtggacagagtgcaggtggagtaacatcactccgtgctctgaaccccttctgagtcatagggaaggcacacagtgagacacgacaaatttattttatattatctgtgagcagccaattctattaggccctccttttgatttattactcaataatgattcagcattcgttgtgttcacagcgatagcaatatttgaaatcgtccgtttatgtcctcagaggtttcacactccagggcactgtgccatgtgttaagattcaggatggggctgggtgtggtggctcatgcctgtaatcccagcactttgggaggctgaggcgggcagatcacttgaggtgaggagttcgagaccagcctggccaatatggcaaaaccctgtctctacaaaaaatacaaaagttagctaggcctggtggtgagcgcctgtaatcccagctacttgggaggttgaggcaggagaatcttagcttaaacctgggaggcagagattgcagtgagccgagatcgcaccactgcactccagcctggcccacagatcgagaccctgtctcaaaaaaaaaaaaaaaaagattcaggatgggtgggggactgcactgttctcttctgtaaagtgcaggaagcacacttgtgaaggggacaggtggacaatgggaagtgggaatgctcttctaacagagcattcttgggctgtccttttaggcaggacacgtataattccagctagcagttgtgtgacacgcatcccactgggcaggtcctgttctaagggtttctcattgaatcctcacaaccaccccgtgaggcagaattgctcttattcctattttacaagacgaggaaactgaaccacagagatgttaaggaactagcctgaggtcacacagccggtggggtgatttgaacaggctggctcctgattttgtgctgttaattatcagactctgtggcctgtgtggaaattgagaatctcttgtttccttaaaactactcctttccttgtaccacctggaagttctagaagactggatcatgaggtcttagatatgcagacggaggcctgacccagcttgaacaattattggtattttgccattcttagttcctctacctctcactccaccccctcttttttggtagaatattttagatcaaattctaggcagatcagttctcctctaactacttcagtaagcatctgcttttcagcaacaaaaaaggacttttaaggcacaggagtttgcttttcatgcctgtaatcccagcactttgggaggcctaggtggaaggatcgctggaggccaggagttcaagaccagcctgagcaacatagcaaaacccagtctctacaaaaataaaaataaagaataagccgggcatggtgactagtgcctatcatttcagctactcaggaggctaaggtgggagaatatcttcagcccaggaggtggaggtggcagtgaggcgagactgtgccactgcactccagtgaggccctgtctctaaaaaaaaaaaaaaaaaaaggaaggaagaaagaaagagatatgagggcatgtggtaattaccagtaacaacaataacattaattccctaacatcatgtaaagcccaatctgggttcaaattttcccaattgtctaaaaaaaaaaaaaggtttttttctattttgtttggctctagaaccaaaccaaatacacatactgcattggattgatctacctctttgcttttactctgtcagaatttccttcctttgttcctcccaacatagtattatgaaaattgtcaaatatacaaaaaagttgaaagaattttacagtgaagacccataaacctaccacctggactctacactctaattctttttcttttcttttttctttctttctttctttctttttttttttttttgagatggagtctcactctgttgcctaatctggagtgcagtggtgcaatctcagctcactgcaacctccgcctcccgggttcaagcgattctcccacctcagcctcccacgtagctgggattacagatgtgcgccatcatgcccagctaatttttgtatttttagtagaaacgggttttaccatgttggctaggctggtctcgaactcctgacctcaagtgatcctcctgcctcggcttccaaaaatgctggggttacaggtgtgagccaccgcgcccggcctcttcactctaattctaattcattcatttgccttatcacatagctatccctccatccagctcttccttttgtctatgtcacttatttactgggaaagataggttatttatcctgcagaatttcatactttcaggatctggctagttgctattttggagtgttattgaacttgtccctatgtccccatgattctcctgtaagctggatgtcagcttcagaacagcaccacccagcagaacttcaatgatgacagctccatatttgagctgttcaaatacataccaggtcaccacaggtcacatgtggctgctgagcacttgcaatgaggctgttgtgactgaggagctaaatcttcaattttgtttcattttaattaacttacatccaaatggtcacaagtggctagtggctactgtatttgacagcacagatagagatttaatgtggtttagttttagtcacttagatttgctttttatggagtgactggagtttggggaggggagcagggaggtttttctttttttctttataacactggctaaatattttaattactgctatagaaggaagaagctaaaagtattgcattcacaaatattgcatagattatacaaacacagaaatatatgcatatgcatgtttaaaatatatgccacatatcaacaccatgtatccaacttgaataaggtcattaaagacataatagaaggctgggtgtggtggctcattcctgcaatcccggcacttcgggaggctgaggcaggtggactgcttgagcccaggagtttgaggccagcctgggcaacatagcgagaccgcatctctataaaaaatttgaacagttagccaggcatgatggtgcacgcctatagtcccagctactcaggaggctgaagtgggaggattgcttgagcccaggaggtcaaagctgcagtgagctgtgatagcaagcaccaccgcgctccagcctgagtaacagagcgacccctatctcaaaaaaaaaaaaaaccataatagataactccaaaccatagttaaattgggaaagaatcttaattatcaggatcagattaactgcgatgtaatgtgttccccaagcaccctgcaatgggaccgcttgtgtgtgagtgtctttgagcatctgtgtgtgcatacgaatgtgttgggggaccgcttgtgtgtgtgtgagtgtgtttgagcgtgtgtgtgcatatgaatgtcttgggggaccacttgtgtgtgagtgtgtttgagtgtttgtgtgcatacgaatgtgttgagggaccacttgtatgtgagtgtgtctcgaactcctgacctgggagcaggaattcttgatcttgatgtctcctctccctgcagcactgagctgcccaccccacagccactatgaggcgtgttcctacggctgcccgctgtcctgtggagacctcccagtgcccgggggctgtggctcagaatgccatgagggctgcgtgtgcgatgagggctttgcgctcagtggtgagtcctgcctgcccctggcctcctgtggctgcgtacaccagggcacctaccacccaccaggccagaccttctaccctggccccggatgtgattccctttgccactgccaggagggcggcctggtgtcctgtgagtcctccagctgcggaccgcacgaggcctgccagccatccggtggcagcttgggctgtgtggccgtgggctctagcacctgccaggcgtcaggagacccccactacaccaccttcgatggccgccgcttcgacttcatgggcacctgcgtgtatgtgctggctcagacctgcggcacccggcctggcctgcatcggtttgccgtcctgcaggagaacgtggcctggggtaatgggcgagtcagtgtgaccagggtgatcacggtccaggtggcaaacttcaccctgcggctggagcagagacagtggaaggtcacggtgagagcagatggggaacagggggccaggggcctgtgggtgggtgggacacaggccgcgctcagcccaggagttgggggcacagagatgagagtgcatgtgcgaggcctggggtccctgaggacagaagatgccagtcagaacccagagtgggaagccaatgagggaggtgtcatcagggacttgggagctgctcccccatctctgtccctaagtctgcaccctctcttcacctccatgcattgacttttctttttcttttttttttttttttgagatggagtatggctctgtcgcccaggctgcaacgcaatggtgcgatctgggctcactacaacctccgcttcctgggttcagtggattctcctgcctcagcctcccaagtagctgggattacaggcgcccaccacaacacctggctaatttttctatttagtagagacagggtttcaccatgttggccaggctggtcttgaacgcctgaccttgtgatccacccgccttggcctcccaaagcgctaggattacaggcgtgagccactgcacctggccgcattgacttttctctccaaatctctcccactctctcctccctcccgcttcatcctctcctcacctcaatcctggattctgccctacccacctccctagtctgccactcattggcaggatgtgataccatcagaggttgggaaaaatcaagtctggagaagcttcatggacagaggacaatctgtgggtgacactctcaccgccttaacaacaacaacagcagctatagtttctatacagctgactgcacaccttttggctgccaggcacttcacgtccatggtgtctgtatgcttccaacaggggctgcaggcactatgacttgctttatttttcagagtgggacggcccatcactggcccatagtcccccagcaaaggtggagcttgaaccccatgctgctctgcagtgctttgctcactgagaagatttggtctcatgtggagactggcatctcagttatagtggaggggtttcccctgagatcccactgaaacagacacgcagctgtttttctagtagcagtattggcgaaggtgctgatcaattactgacttaatctggtgaactggacaggcgtgactttttttttttttttttttttttgagagacagtctcactttctcacccagactagagtgcagtggcgcgatctcaactcactgcaacctctgcctccctggttcaagtgattctcctgcctcagctacaagcacccgccaccatgcccagttactttattgcatttttagtagagacgtgggtttcaccatgttggccaggatggtctcaatctcctgacctcgagatccacccacttcggcctctcaaagtgctgggattacaggcgtgagccaccacatccggacaatttttttttttttatagagaggggtcttgctatgttgcccaggctggtctcgaactcctgggctcaagaaaccctcccaccttggcctcccaaagtgctggaattacagttgtgaaccactgctcctgaccaatttttttttttattttttttactttgtagagacaggatctccatatgttgctcaggctgaccttgaactcctgggctcaagtgatcttcccaccttggcctctcaaagtgctgggattatagatataagccactgtgcccagcccaggggtggatttaggaggctttgttggtgcctattaaccttaaactgaaaccactggtcctcagctcataggtttaagttcatttccccaagaatttagcctaactttccactcgctgatgctttaaagcaaaaacctgtggtgtctgtttactcttcaaaagaaaaaactccactcatagctgctaataacagcaaatgctcctgaagcatgcatgctatgccagccacgtttctcagcactttacaaatattaatttatctgatcctgacaacagttccgtggggcaaacaccttattcccgcctgatagatgaggaaacagaaacagggagaggtgactttgtgacccccaaggtcacaaagagggtaagggggaaactgtttgaactcgggcaagtggctctgggggcgatcattgcttattaatgactgcagcaagtggtaaacaaaggatagctggaggcttgttacttcatcgagacctgtattcgtttcccatggctgccataacaaattaccacgagcttggtggcttaaaacactagaaatgtatgttccacagtcctgggtgccagaagttcaacatcaaggtgtgggcagggctgcaccccttccaaagacactggttgggggatcttcctttccctttccagctctgcagactccaggttctctgggcttgtgacaccaccattctaatccctgccttcatcttcatgtggccctttctgtgtgtctctttgcctttttctttctggctcttataaggacacttgtcattggatttagggcccagtttaatccaggataatctcatgttgagattattaccctgattacatctgcaaagaactttattccaagtaagctcacgttatgggattctgggtgaatatgtcttttatggaccaccattcaatccactatcaggccctattattctaccaactttagagatacaaaaagtgaagccctaagaggtgtggtcacacagatcttcagcatcaggcatgggcttgaactagggtcctacccctactcaaagtctactttctgaagcgtggcctgcctctctcacctcccaggtgaacggtgtggacatgaagctgcccgtggtgctggccaacggccagatccgtgcctcccagcatggttcagatgttgtgattgagaccgacttcggcctgcgtgtggcctacgaccttgtgtactatgtgcgggtcaccgtccccggaaactactaccagcagatgtgtggcctgtgtgggaactacaacggcgaccccaaggatgacttccagaagcccaatggctcacaggcaggcaacgccaatgagttcggcaactcctgggaggaggtggtgcccgactctccctgcctgccgcccaccccttgcccgccggggagcgaggactgtatccccagccacaagtgtcctcccgagctggagaagaagtatcagaaggaggagttctgtgggctcctctccagccccacagggccactgtcctcctgccacaagctggtggatccccagggtcccttgaaagattgcatctttgatctctgcctgggtggtgggaacctgagcattctctgcagcaacatccatgcctacgtgagtgcttgccaggcggctggaggccacgtggagccctggaggactgaaactttctgtcgtgagtgagggagagccggaggggcagggaggggagagcttgaggcacagaaggggtagaccctgggccttgcagcccctccctccccagggctctgatcggcaccccctccttgcagccatggagtgccctccgaacagtcactacgagctctgtgcggacacctgctccctgggctgctcagctctcagtgcccctccacagtgccaggatgggtgtgctgagggctgccagtgtgactccggcttcctctacaatggccaagcctgcgtgcccatccagcaatgcggctgctaccacaatggtgtctactatgaggtaggaacctagtcatctggggcagaatatggggcctcacccctcccactgctcatcagccccacggcctgtctacttggcctcttatttatttcttttagagtcagggtctcactccgtcacccaggctggagggcaagggtaccatagctcactgcagccccgaattccttggctcaagcaatccttccacctcacctcccaagtgtctgggactataggcatgcaccaccaagcccagcgaatttttaattttcctgtggacacatagagatgggggcgaatcactatgtagctcaggctggtcttgaactccaggcctcaagccatcctcctaccttggcctccccaagggctgggattaatggcatgagccaccaggcccgacccactgagcctctttttttttttttttttttttaaatgacatagtcttgctctgtgcccaggccggagtgcaacctccactgcctgggttcaagctcactgcaacctcagcatcccaggttcaagtaattctcctgcgccagcctcccaagaagctaagactacaggcatgtgccaccacacatggttaatttttgtagttttgttagagatgggattttgccatattggccaggctgctctcaaattcctgactgcaagtgatcctcctgcgttggcctcccaaagtgtgagcattacaggcgtgagccaccacagctagtccactcagtctcttcaatgtctcttgtacccactcctttccccgtccccatggccctcccttggtccagctggtcctctcccacctgggtccctcccagctcctacctttgctccctctggtccaccctccacgtggcagtggtaaagatctttctaaatatgaccacgggctctgaagctttaaaccctcccctgactccccaggtcaagttgtggctttgccttccaggtctggacgaagggagcctttctgaccacaaagacaagattttcatgtgttataccagctgctaacaccctctacttccctctcccactctgtccccgttggtcctttttctttgactggagcatgtgtttgtccaatgtccatctcccttggggactgtgagctctcctggggtggaaccctctctctgttgttctcctcacatgaataataataataataacagaaaatgtgtagatagtgcttactatgtatctggtaccgttttaagtgctatgtgtgcatatttttatatatgcattacatatctaaaaactttttattctgaaaacgttcaaacatgcaaaaatcaagagaacagtggaatgactgtccatgtacttacccatcacttagcttcagaaataagccacattctcccaatcttgtttcatgtctaccccactcatctctcctatctgaatgatttaagggaaacccttttcctttcatctgcacttcacatgtgttattaacttggttatatttccataggcaggtgctactattatctgcaatttgcaaatcaggaaactgagccaacaagaggtgaggtaacttgcccagagtcacacagttcggaaacagcagaaacgggcttcaagcccaggcgatctgcccttagttactgtgtcacaccatttctcctacagcagacattgagcggatattttggaatgaatgagttaatgaagaaaagtgaatgaacaaatgtacaaatgaatcatggcctcaaagccatgctgtgcctcatcttcacagacaacgggccatcctgctgagagatgtcccttgtctgtgatgtctgccaaacccctctgtgccagaacgccagagatgtgagagtcggctcccacccgtggtgtccctgatggccgttccctctctccccacagccggagcagacagtcctcattgacaactgtcggcagcagtgcacgtgccatgcgggtaaaggcatggtgtgccaggaacacagctgcaagccggggcaggtgtgccagccctccggaggcatcctgagctgcgtcaccaaaggtgctgagctggggttgggcctggggctgatgcgactagggatggaggacaaggactctggggctgagggtggtgtaactggggtgtccatggcgggaggtgcacaggactaaagattgaggtcacagacctagggacccctgggctgggtttcatagggccagggttacctactatgggaggcagggacccttaaggggaatctaggctgtgcggaccctcagaggtaagtttctcagggtggctgtcagaggccctcagtataaggcaggcccaggcgcgcctttgctctaatgtgctacatggcaaatgtttaagctcgcagggtgcatggtctcgttccagctactcactctgccactgtggcatgaaagcagccgtagactatgtaagtgaagaggtcaggctcctataagactttagaatacaagagcagcagcctagggggccatcgtgagcagaacactgatgtgtgggattagttgtggggttcagacactagcagcacagggcaggggagagactgggatcccaggggcagggacagagagcagagttctgagtctcaggcacagagaccccaccaaggcaggatgttggatatggggacccatctcaagtggaagatcaggatttctaggagtatagtctctgatgtgggaatccccgagactaaatctgggacacagccacccccagggctcatttcttagggtgaagagcagagaactctcctccccctaaggataagagaatgggagctcccgcaccaaggagtgggggctaagactctcagggctgatgagcaggataatggggactcccaggaatggggggtatatcactcagcatctagtcgagagacagaaagcgtatggccatttgaatgaggaaagtttaattaaacatttacttattaataggagattaactattaagggtaaagagggcctgctgccgtggctcacacacccagcactttgggaggatcgcttgaggccaggagtttgagaccagcctgggcaacatagtgagacccctgtctccacaaaaaattgaaaattagccaggtgtggtgatgcgtgcctgtggtcccagctatttaggatgctgaggtaggaggatcagttgaccccaggatttcgaggctgcagtgagctatgattgcaccactgctctccagcctgggcaagacagcaagaccttgtctctttacaaataaataaataaacataaataagaaacggtaaagagagcactaaagaataccaccaaagcaaacataagaagtagctcccactctagggctaaggtagaggcctcaaggaagggagacattggcccctcctcttcaaggaggggagaatcagccccaaggctgagtccagtctcactgcagctgtagcccactgggtggcacagaggtttctgcaggctggacttggcaagaagggaacccctcactgggaagccagctgcggccagtggcactcgctgaatgtggccccgcaccctggccagagctggaaggaccaaactggctggaatccagaccagtagcccctccctcctgtggtgactctccagcgccctctgttgacaaagcttaactccgtgggtatatttgaagctgagaggcggtacattgataatggacacaggaggaaggagacgtttgaaggctggcctctcccacacagcggttccgcaagctggggtcacagatgtagtaactgtccgaacagggtctcggacacagaagccctccaggacagggcctcagcagtgagacacgctcaaggctactgtcttgaacacagcaaccctcagggatggagtcttgcactgagggagcccaggccatgagacttagctagttagggtctcaaacgtttgaaatcctgctgagaccctggcactgggctcttgccagagatcaccccagggccgtagtcttgggcatagaggcctccaggacctggagaaattggagaccaatttctctcaaatgtggagatgtccagggggctgagatctcaggcatggggggccctgaggcctagatctttttttttttttttttttttttgagataagtctcactctgtcgcccaggctggagtgtagtgatgcaatcatagctcactgcagcctccatctcctgggctcaaacaattctcccgcctcagccttctgagtagtgggggactacaggcacacaccaccatgcctggctcatttattaagttatttgtagaaatggggtcttgctatgttgcccaggcctggtctcaaactccagggctcaaatggtcctcccgtctcagcctcttaaagtgctgggattacaggcctgagccaccacacctggcctggggcccaggtcttgaacacagagaaccctggggctgggatctcagacatggatgctctcagggctggcatcgcagacacaaggacccctggggcacagatctcaactggggtcaagtgcaccttttctctaaagggctagatggtaagtgtttaagcttgcaggctataccttctggatcacaactactcactctgccactgtggtgtgaaagcagccgtagcctatgtaagtgaagacggtgaggtttctataaagctttagaatataagaacaggctgaactctcaagcaagggcacaatggaaactgtaacttaaaaacagaaatctgcaggaccagtgtctcaaacatggggaccccagagactgggtcttaggtgcagggactccaggacctcagtctcacacagcagatggcagggcctcagtctcagaggcagggggactctagggcctaagtcttggctgtagggacctctggggccgggatctcagatatgggaactttgacacccgagacatagacacagtccaccatgatgcctcagtgtcagatgtgcaggactcccaggggctggtcttgaaaatagcaggccgggcgtagtggctcaggcctgtaatcccagcactctgggaagctgaggtgggcaggtcacttgaggtcaggagctcaagaccagcctgggcaacatggtgaaaccctgtctctactaaaaatacaaaaatcagccaagcatgctggtgggcacctgtaatgccagctactcaggaggctcagtcaggacaatctcttgagcccgggaggcagaggttgtagtgagccaagattgcatcattgctctccagcctgggtgacagagaaagactccatctcaaaaaaccaataaaacaaaacaaaacaaaataaaaaagcaaactataggacctgggtcctagacatgaggactctggaatgtggtcttgcctgcagtaaccctcagatccctggcacagactggggtagatgtggagggagcggccatcctttacaatgggcagcccctcaaggtcctcctccctcttctgtccccagacccgtgccacggcgtgacatgccggccacaggagacatgcaaggagcagggtggccagggcgtgtgcctgcccaactatgaggccacgtgctggctgtggggcgacccacactaccactccttcgatggccggaagtttgacttccagggcacctgtaactatgtgctggcaacaactggctgcccgggggtcagcacccagggcctgacacccttcaccgtcaccaccaagaaccagaaccggggcaaccctgctgtgtcctacgtgagagtcgtcaccgtggctgccctcggcaccaacatctccatccacaaggacgagatcggcaaagtccgggtatgtgtggcaggatggtcccctgaggtccccgggagggcaggagggatcctgacgaccacagttagcagctcaaggctctttgtcttcacctgggcctgaaacaaactgtcaacaaagagaataattgcaacaaaaatgtcaccctgttactgggaattaaatgagcctagcccctggcaaagggctttaacataggacctcagcatttgccttttttatagacctgggtttcaatccagcctctcctccttatgagctatgtgatgctgggcagttcacttggtaggcctcagtttcctcatctgtgaagtgggcatcgtatcagggcctcccccacagcaaggccgtgcatgtcacatgctgagctcagagtctagtccaggtgaacagtcgtttgagtgtcggtgagggaaaagtgagaggcccagagaccaggacatggagagaaatacagggagatcgggctaggtgcggtggctcacgcctgtaatcccagcactctgggagaccgaggccgatggatcatctgaggtcaggagttcgagacaagcctggctaacatggtgaaattccgtctctactaaaaatacaaaaattagctgggtgtggtgatgctcctgaattctcagctactcaggacactgaggcaggagaattgcttgaacctgggaggcagaggttacaagagccgagactgcaacactgcacacaagcctcggtgacatagtgagactccgtctgaaaaataaaaaaagtaatcaagaaaaagaaatatagggagatgggggagaggaatgggctatcctttctgcccaaggaaatggagatgtagcttgatggcagctcacatggagagactgagtgatgcagcagagtaggcactgaataaatgatggtgagtgagtggaagagatgcacaaagaatgagggaggtagggaggaagggaaaagggtgagacagagacagagagacagaaagagagagagagagacagagacagagagagagaagacccagaggcatagccttaggtgaagacagggggagagagacacagagagagagacagagacaggggagggagatagagatgaagggagaagatctagaaaaagtaaagtgaggtttcgttccccaagacctgggctagaacaactgtccacagtgtgtcagatgacaatccaactctcgggggaaggccctggcctctcccagcccccggtgggatgagagagagggaggcagagggccagagctggggccgtaaaacctccagtgacccgtttgccttccctccttcccccaggtgaacggtgtgctcacagccttgcctgtctctgtggccgacgggcggatttcagtgacccagggtgcatcgaaggcactgctggtggctgactttggactgcaagtcagctatgactggaactggcgggtagacgtgacgctgcccagcagctatcatggcgcagtgtgcgggctctgcggtaacatggaccgcaaccccaacaatgaccaggtcttccctaatggcacactggctccctccatacccatctggggcggcagctggcgagccccaggctgggacccactgtgttgggacgaatgtcgggggtcctgcccaacgtgccctgaggaccggttggagcagtacgagggccctggcttctgcggacccctggcccccggcacagggggccctttcaccacctgccatgctcatgtgccacctgagagcttcttcaagggctgtgttctggacgtctgcatgggtggtggggaccgtgacattctttgcaaggctctggcttcctatgtggccgcctgccaggctgctggggttgtcatcgaagactggcgggcacaggttggctgtggtgagtgttgggggagcagaggcggggctgggggcggggtcccatctcttcggggctggtttggtttcactctggtccttctgggtctctttgttttcttttttctctgtttgtctctctgtttcttggtgctcgtctctgggcctcgctttgcttgtctctatctgtctgtttctcattctctagctccctcagtttctgcttgggtctcctggtgtctcgctttctcccatttctttctctgtgtcctctctctgtgtcttgttttctgtctccccctttctctgtctgctccctagtgtctctctctgtctcctcccaccctgttctgggaccccacccctaacacccttctttctgtttctctccttcctgctccttcatctgcccacagagatcacctgcccagaaaacagccactatgaggtctgtggctcaccctgcccggccagctgtccgtcccctgcaccccttacgacgccagccgtatgtgagggcccctgtgtggagggctgccagtgcgacgcgggtttcgtgttaagtgctgaccgctgtgttcccctcaacaacggctgcggctgctgggccaatggcacctaccacgaggcgggcagtgagttttgggctgatggcacctgctcccagtggtgtcgctgcgggcctgggggtggctcgctggtctgcacacctgccagctgtgggctgggtgaagtgtgtggcctcctgccatccggccagcacggctgccagcccgtcagcacagctgagtgccaggcgtggggtgacccccattacgtcactctggatgggcaccgattcaatttccaaggcacctgcgagtacctgctgagtgcaccctgccacggaccacccttgggggctgagaacttcactgtcactgtagccaatgagcaccggggcagccaggctgtcagctacacccgcagtgtcaccctgcaaatctacaaccacagcctgacactgagtgcccgctggccccggaagctacaggtgaggagggctgtgggccagacaggagcaagtgccagctctggggttgcctgagatggtaagggcttcaccattcccctgggcacctttcacagcttagctggggcatgatggaagggtcagagtgtacgcctaggagcctgacggcttggcacagcagcttcttcctctgtgagcctagtgtattcctctgtaaactggtctaggaaaagtacctgttttcgagaaggataaggagtcagtgacatgagccagtagaggctctttgtttttcttttctttttttctttcttgcttttctttctttctttctttctttcttttcttagcctgactctgttgcccaggctggagtgcagtgacaggattagggctcactgcagcctggaactcgtgggctgaatcgatcctcccgccttggcctccacctcccaagtatctgtgactaaaggcacacgccaccacgctggctaatttttcatttttttgtagagatgggggtctcactatgttgcccaggctgatctgaacttctggcgtcaagcgatcctcccatctcggccttccaaagtcctgggattgcaggctttgccaccaggcccggcctatagatgctcattattattttcagcgggaggtgacatgctctgggtcccacagctagtaggtagtggggccaggattcaaacccgtgtttgctccgttcaccgctcccccactgcccacaggtggacggcgtgttcgtcactctgcccttccagctggactcgctcctgcacgcacacctgagcggcgccgacgtggtggtgaccacaacctcagggctctcgctggctttcgacggggacagcttcgtgcgcctgcgcgtgccggcggcgtacgcgggctctctctgtggcttatgcgggaactacaaccaggaccccgcagacgacctgaaggcggtgggcgggaagcccgccggatggcaggtgggcggcgcccagggctgcggggaatgtgtgtccaagccatgcccgtcgccgtgcaccccagagcagcaagagtccttcggcggcccggacgcctgcggcgtgatctccgccaccgacggcccgctggcgccctgccacggccttgtgccgcccgcgcagtacttccagggctgcttgctggacgcctgccaagttcagggccatcctggaggcctctgtcctgcagtggccacctacgtggcagcctgtcaggccgctggggcccagctccgcgagtggaggcggccggacttctgtcgtgagtactgctccatgcatggtccacatagtagggtctctccctgcccttcccaggactgtaggacagcagccccttcctcctccatgaggctgaggggccaccttccttcccgagctcggtatctactgtcaggaaacaccttggcactgacacactgaaatgccccaagtcaggtactgcagtgagagagagtccgttagaaacacctagtcagagtgtgggcgcggtggctcacgcctgtaatcccagcaatttgggaggccgaggcgggcggatcacctgaggtcaggaggtcgagactagcccggccaacatggtgaaaccccacctctactaaaactacaaaaattatccgggcgtggtggcgggcacctgtaatctcagctactcaggaggctgaggcaggagaatcacttgaacccaggaggcagaggttgcagtgagccgagatcgtgccactgcccttcagcctgggtgacagagattccatctccaaaacaaaaaacaaacaaacaacaaacaacagaaaaaaaaaaagaaagaaaagaaacctggggtccaggacactcttagggattggtgatccatgctttcaggtatccaaggcatgtagattgggatggctgaccctgcctctgtcacatagcaaagtaccccttgttaggaagacctagtgagtttcagctggtcagagggcccaggtctgttgcacacactgaaatacacctagtcacatggaattagtcgcataccttcagtgatatctgcttaaattttatactgactggtcagatacactcagaaagaaacaggatcctggcatagccttgggcagatccacacagatgcatggttagatagtcctaggcggttcccttcaggcaggtctcctggtcacaggtatcctgccaacttcacccaggcacacccttaggcagaccatgtcagaaggactctgggagatgctgcatgtcagacacccacagctgggtgccctcaggcagagccataccctgagatacatgtggccccacaccccagtcacattcacacgctgagatgcccatagtcagttctgatcctgcataccccgaatagatataagtgatccatttcacccaggtaagcctggcttacatagtgagaccccatctctacacaaaataataataaatcagccagatgtggtggcttactcctgtagtcccagctaatcgggaggctgaggccagaggattgcttgaggtttaggtggaggctgcagcgagctgtgattgcgcctctgcactccagcctgggtgagatagagtgagagcctgtctcaaaaaaaaaaaaaaaaaaaaatcagccaagcagagtcatttgatcttcagaaatatttggtcagagagacctgggcatgtcccctcccattccaggtcccacgctgagtcccccagttagatgtcctggatcacatgtgcctacccagagacgcccaagttggcctgagcagttttcccactcagggcctcccaagactgcgactcaaacacctacctggctgatgcccaccttgtccccacagccttccagtgccctgcccacagccactacgagctctgcggtgactcctgtcctgggagctgcccgagcctgtcggcacccgagggctgtgagtcggcctgccgtgaaggctgtgtctgcgatgctggcttcgtgctcagtggtgacacgtgtgtacctgtgggccagtgtggctgcctccacgatgaccgctactacccactgggccagaccttctaccctggccctgggtgtgattccctttgccgctgccgggagggcggtgaggtgtcctgtgagccctccagctgcggcccgcatgagacctgccggccatccggtggcagcttgggctgcgtggccgtgggctctaccacctgccaggcgtcgggagatccccactacaccaccttcgatggccgccgcttcgacttcatgggcacctgcgtgtatgtgctggctcagacctgcggcacccggcctggcctacatcggtttgccgtcctgcaggagaacgtggcctggggtaatgggcgagtcagtgtgaccagggtgatcacggtccaggtggcaaacttcaccctgcggctggagcagagacagtggaaggtcacggtgagagcagatggggagcagggggcgaggggcctgtgggtaggtggggcacaggcagcgctcagcccaggagttgggggcacaagagatgagagtgcatgtgcgaggcctggggtctctgaggacagaagatgccagtcagaaccgagtgggaagccaatgagggaggtgtcatcagggacttgggagctgctcccccatctctgtccctcagtctccaccctctctttacctccatgcattgacttttctctccaaatttctcccaccctctcctccctcccactccatcctctctccacctcagtcctggattctgccctactcacctccctagtctgccacttattggcaggacgtggtgccatcagaggttgagaaagtccgagtttggagaagcttcatggacagaggacaatctgtgggtgacactctcaccgccttaacaacaacaacagcagctatagtttctatacagctgactgcacaccttttggctgccaggcacttcacgtccatggtgtctgtatgcttgcaacagggactgcaggcactatgacttgctttatttttcagagtgggatggcccatcactggcccatagtcccccagcaaaggtggagcttgaaccccgtgctgctctgcagtgcttttcttactgagaagatttggtctcatgtggagactggcatctgagttacagtggaggggtttcccctgagatcccactgaaacagacacgcagctgtttttctagtggcagtattggcgaaggtgctgatcaattactgacttaatctggcgaactggacaggcgtgactttttttttttttttttggcacagagtctggctttgtcacccaggctggagtgcagtggcgcgatctcggctcactgcaacctctgcctccctggttcaagtgattctcctgcctcagcctccagagtagctgggattacaggtgtgcaacactatgcccaggaaatttttgtatttttagtggggacgggtttcaccatgttggccagtctggtctccaactcctgagctcagtgatctgccggcctcagcctcccaaagtgctgggaatagaggcatgagccactgtgcccggccgacatgcaggacttaattgaatatattccctaatgtttcccaagctcctagaatagcccctgacatacagcgcctaaatacacaggagttgttgatgttcttgttagttgcttcttactgaaacccccagcttccctacagatgtgggagctcttattaccccgcagtttacagctgaggaaactgaggcaaggctaagtcagttgcccttacccaccgcccagccctgcttgggaagtgtggcagttgaccatctttttaggagactcagccaggagcatgtctttctcctgccttctcctctgattcttcacatttccaaaagaatccggtgtgcactgtctgtgataaggaagggtaagaaagcatgttaatcaggggttgatgtatttatttattttttagagacagggtctcgctctatcaccaaggctggagtgcagtggtgtgatcctagctcactgcagcctcaaactcctgctctcaagcaatcctaccacttcagcctcctgagtggctgggagtacaggcatgcaccaccatgcccagttaatttgttttcttttttattttgtagagacaggatctcgatatattgcttaggctgaccttgaactcctgggctcaagtgatcttcccgccttggcctctcaaagtgctgggattatagacatgagccactgtgccctgtccaggggtggatttaccaggctttgttggagcctagtaaatctttaactgaaaccactggtcctcagctcataggtttaagttcatttccccaagaatttagcctaactttccactcgctgatgctttaaagcaaaaacctgtggttctgtttactcttcagaagaaaaacctccactcatagctgctaataacagcaaatgctcctgaagcatgcatgctatgccagccacgtttctcagcactttacagatactaatttatgtgatcctgacaacagttccatggggcaaacgccttattcccacttgatagatgaggaaacagaaacagggagaggtgactcacttgcccaaggtcacaaagagggtaagggggaaactgtttgaactggggcaagtggctccgggggcgatcattgcttattaatggctgcagcaagcggtaaacaaaggatagctggaggcttgttacttcatcgagacctgtattcgtttcccatggctgccataacaaattaccacgagcttggtggcttaaaacactagaaatgtatgttccacagtcctgggtgccagaagttcaacatcaaggtgtgggcagggctgcaccccctccaaagacactggttgggggatcttcctttccctttccagctctgcagactccaggttctctgggcttgtgacaacaccattctaatccctgccttcatcttcatgtggccttttctgtgtgtctctttgcctttttctttctggctcttataaggatactagtcattggatttaaggcccaatttaatccaggataatctcatgttgagattattaccctgattacatctgcaaagaactttattccgagtaagctcacgctatgggattctgggtgaatatgtcttttggggaccaccattcaatctactatcaggccctgttattatatccatttaataaataggaaactgagggcctaaggggtgaggtcacaaagatcagcatcaggcatgggcttgaactagggtcccaccctcactcaaagtatactttctgaagcgtggcctgcctctcttcccctcccaggtgaacggtgtggacatgaagctgcccgtggtgctggccaacggccagatccgtgcctcccagcatggttcagatgttgtgattgagaccgacttcggcctgcgtgtggcctacgaccttgtgtactatgtgcgggtcaccgtccctggaaactactaccagctgatgtgtggcctgtgtgggaactacaacggcgaccccaaggatgacttccagaagcccaatggctcgcaggcaggcaacgccaatgagttcggcaactcctgggaggaggtggtgcccgactctccctgcctgccgccgcccacctgcccgccggggagcgagggctgtatccccagcgaggagtgtcctcccgagctggagaagaagtatcagaaggaggagttctgtgggctcctctccagccccacagggccactgtcctcttgccacaagctggtggatccccagggtcccttgaaagattgcatctttgatctctgcctgggtggtgggaacctgagcattctctgcagcaacatccatgcctacgtgagtgcttgccaggcagctggaggccaggtggagccctggaggaatgaaactttctgtcgtgagtgagggagagccggaggggcagggaggggagagcttgaggcacagaaggggtagaccctgggccttgcagcccctccctccccagggctctgatcggcaccccctccttgcagccatggaatgccctcagaacagtcactacgagctctgtgcggacacctgctccctgggctgctcggctctcagtgcccctctgcagtgcccagatgggtgtgctgagggctgccagtgtgactccggcttcctctacaacggccaagcctgcgtgcccatccagcaatgtggctgctaccacaatggtgcctactatgaggtaggaacctagtcatctggggcagaatatggggtctcacccctcccactgctcatcagccccacggcctgtctacttagcctcttatttatttcttttagagtcagggtctcactcttgtcacccagactggagtgcagtggtaccatcatagttcactgcagccccaaattccttggctcaagcaatccttcacctcacctcccaagtacctgggactataggtgcgcaccaccaagcccagcgaatttttaattttcctgtggacacatagagatgggggcgtctcactatgttgctcaggctggtcgtgaactccaggcctcaagccatcgtccccccttggccacccaaagtgctgggattaatggcatgagccaccatgcccgacccactgagcctctttttttttttttttttaaagatatagtcttgctctgttgcccaggctggagtgcaacctctgcctctcgggttcaagctcactgcaacctcagcatcccaggttgaagcaattctcttgtctcagcctcccgagtagctaggagtacaggcacgtgccaccacactcggttaattttttgtattttggtagaggtggagttttgccatattggccaggctgctctcgaactcctgacttcaagtgatcctcctgccttggcctcccaaagtgcgagcattacaggcgtgagccaccacagctagtccactcagtctcttcagtgtctcttgtacccactcctttccccgtccccatggccctcccttggtccagctggtcctctcccacctgggtccctcccagctcctacctttgctccctctggtccaccctccacgtggcagtggtaaagagctttctaaatatgaccacgggctctgaagctttaaaccctcccctgactccccaggtcaagttgtggctttgccttccaggtctggacgaagggagcctttctgaccacaaagacaagattttcatgtgttataccagctgctaacaccctctacttccctctcccactctgtccccattggtcctttttctttgactggagcatgtgtttgtctaatgtccatctcccttggggactgtgagctctcctaggggtggaaccctctctctgttgttctcctcacataaataatattaataataacagaaaatgtgtagatagtgcttactatgtatctggtaccgttttaagtgctatgtgtgcatatttttatatatgcattacatatctaaaaactttttattctgaaaacgttcaaacatgcaaaaattaagagaatagtggaatgactgtccatgtacttacccatcacttagcttcaaaaataagccatattctcccgatcttgtttgatgtctaccccacgtatctctcctatctgaatgttttaaaggaaacccttttctgtttttgttttttttttcccttgagttggagtctcgctctgtcactcaggctggagtgcagtggcgcagttttgcctcactgcaagctccgcctcccgagttcacaccattctcctgcctcagcctcccgagtagctgggactataggcgcccgccaccacgcccgactaattttttgtatttttagtagagacggggtttcaccgtgttagccaggatggtctcaatcttctgacctcgtgatccacccgcctcggcttcccaaagtgctgggattacaagcatgtgccaccgcgcccggcctacccttttcattttatctgaattttacatgtctgaatataacttggttattatctgaatataactcagttatatttccaaaggcaggcgctactatcatctgcaatctgcagatcatgaaactgagccataaagaggtgaagtaactgcccagagtcacacactttggaaacagcagaaatgggctccaagcccaggcgatctgcccttagttactgtgtcacaccatttctcctacagcagacgttgagtggatattttggaatgaatgagtaaatgaagaaaagtgaatgaaccaatgaatgatggccccaaagccatgctgtgcctcatcttcacagacaacgggccatcctgctgagagatgtcccttgtctgtgatgtctgccaaacccctctgtgccagaacgccagagatgtgagagtcggctcccacccgtggtgtccctgatggccgttccctctctccccacagccggagcagacagtcctcattgacaactgtcggcagcagtgcacgtgccatgtgggtaaagtcgtggtgtgccaggaacacagctgcaagccggggcaggtgtgccagccctccggaggcatcctgagctgcgtcaacaaaggtgctgggctgggctgggctgggactggggctgatgggactagggatggaggatggggactctggggctgcgggtagtgtaactggggtgtccatggcgggaggtgcacaggactaatgattgaggttgcagacctggggaaccctagaccaggtttcacagggccagggccacctactttgggaggtagggacccttagggaaaatccaggctgtggggaccctcagaggtagttttctcagggtggatgtcagagaccctcggtataaggcagggacaggcgcgcctttgctctaatgtgctacatggtaaatgtttaagctcgcaggctgtaggttctcgttccagctactcactctgccactgtggcatgaaagcagccgtagactatgtaagtgaagaggtcaggttcctataagactttagaatacaagagcagcagcctagggttccatcatgagcggaacactgatgtgtgggatcgggcttggggttcagacactagcaccaaagggcaggggagagactgggatcccaggggcagggacagagagcagagttctgagtctcacgcacggagacctcaccaaggcaggacattggatatggggacccctcttaactggaagatcaggatttctaggggtatagtctctgatgtgggaatcccccagactttacaaataaataaataaacataaataagaaacggtaaagagagcactaaagaataccaccaaagcacacacaggaagtagccgccactctagggctaaggtaaaagcctcatggaagggagaaattggccccttctcttcaaggaggggagaatcagccccaaggctgagtccagtctcactgcagctgtagcccactgggtggcacagaggtttctgcaggctggacttggcaagaagggaacccctcactgggaagccagctgcggccagtggcactcgctgaatgtggccccgcaccctggccagagctggaaggaccaaactggctagaagccagaacaggagcccctccctccttcagtgactctccagcgccctctgttgacaaagcttaactccgcgggtgtatttgaagctgagaggcggtacatagataatggacacaggaggaaggagacgtttgaaggctggcctctcccacacaggggttccgcaagctggggtcacagatgtagtaactgtacgaacagggtctcggacacagaaaccccccaggacagggcctcagcagtgagacacgatcaaggctactgtcttgaatacagcaaccctcagggatggagtcttgcactgagggagcccagcccatgagacttagctagttagggtctcaaacatttcaaatcctgctgagaccctggcactgggctcttgccagaagatcaccccagggccctagtcttgggcacagaggcctccaggacctagagaaattggagaccaatttctatcaaatgtggagatgtccagggggctgaggtctcaggcatgggggaccctgagacctagatcttttttttttttttgagctaaggtctcactctgtggcccaggctagagtgtagtgtagcttactgcagcctcgatttcctgggctcaaacaatcctcccgcctcagcctcccgagtagtgggggactacaggcacacaccaccacgcctggctaatttattaatctttctgtagaaatggggtcttactatgttgcccaggctagtctcaaactccagggctcaagctatcctcccacctcagcctcttaaagtgctgggattacaggcctgagccaccacacctggcctggggcccaggtcttgaacacagagaaccctggggctgggatctcagacatggatgctctcagggctggcatcgcagacacaaggacccctggggcacagatctcaactggggtcaagtgcaccttttctctaaagggctagatggtaagtgtttaagcttgcaggctataccttctggatcacaactactcactctgccactgtggtgtgaaagcagccgtagcctatgtaagtgaagacggtgaggttcctataaaacttaaaatacaagaacagggtgaaatctcaagcaagggcaccatggaaagtgcaccttaaacacagacccagagccttggtctttaccttggtcttaggtgcgtggactccaggatctcagtctcacacagcaaatggcagggcctcagtctcagaagtaggggaactctaggtactgggtcttggctgtacagacctctggggcccaggtctcaggtatgggacctttgacagccgagacttagacacagtcccccatggggcctcagtgtcagctgtgtgggactcccaggggctggtcttgaaaatagcaggctgggcatgatggctcatgcctgtaatcccaacactctgggaggccaaggttggctgatcacttgatgtcaggagcccgagaccagcctggccaacatggtgaaaccctgtctctactaaaaatacaaaaatcagccaagcatgctggtgggcacctataatcccagccactcaggaggctgagtcaggagaatcactggagcccaggaggcagaggttgcagtgagccgagattgtaccattgctctccagcctgggtgacagagaaagactccatctcaaaaaaacaacaaaacaaaagaaaatgtaaaagcaaactataggaagtgggtcctagacatgaggactctgtaatgtggtcttgcctgcagtaaccctcagatccctggcacagactgggtagatgtggagggagcggccatgctttacaatgggcagcccctcaaggtcctcctccctcttctgtccccagacccgtgccacggcgtgacatgccggccacaggagacatgcaaggagcagggtggccagggcgtgtgcctgcccaactatgaggccacgtgctggctgtggggcgacccacactaccactccttcgatggccggaagtttgacttccagggcacctgtaactatgtgctggcaacaactggctgcccgggggtcagcacccagggcctgacacccttcaccgtcaccaccaagaaccagaaccggggcaaccctgctgtgtcctacgtgagagtcgtcaccgtggctgccctcggcaccaacatctccatccacaaggacgagatcggcaaagtccgggtatgtgtggcaggatggtcccctgaggtccccgggagggcaggagggatcctgacgaccacagttagcagctcaaggctctttgtcttcacctgggcctgaaacaaactgtcaacaaagagaataattgcaacaaaaatatcaccctgttactgggaattaaatgagcctagcccctggcaaagggctttaacataggacctcagcatttgccttttttatagacctgggtttcaatccagcctctcctccttatgagctatgtgatgctgggcagttcacttggtaggcctcagtttcctcatctgtgaagtgggcatcgtatcagggcctcccccacagcaaggccgtgcatgtcacatgctgagctcagagtctagtccaggtgaacagtcgtttgagtgtcggtgagggaaaagtgagaggcccagagaccaggacatggagagaaatacagggagactgggctgggcccggtggctcacgcctgtaatcccagcactctgggagaccgaggccgatggatcatctgaggtcaggagttcgagacaagcctggctaacatggtgaaattccgtctctactaaaaatacaaaaattagctgggtgtggtgatgctcctgaattctcagctactcaggacactgaggcaggagaattgcttgaacctgggaggcagaggttacaagagccgagactgcaacactgcacacaagcctcggtgacatagtgagactccgtctgaaaaataaaaaaagtaatcaagaaaaagaaatatagggagatgggggagaggaatgggctatcctttctgcccaaggaaatggagatgtagcttgatggcagctcacatggagagactgagggatgcagcagagtaggcactgaataaatgatggtgagtgagtggaagagatgcacaaagaatgagggaggtagggaggaagggaaaagggtgagacagagacagagagacagaaagagagagagagagacagagacagagagagagaagacccagaggcatagccttaggtgaagacagagggagagagacacagagagagagacagagacaggggagggagatagagatgaagggagaagatctagaaaaagtaaagtgaggtttcgttccccaagacctgggctagaacaactgtccacagtgtgtcagatgacaatccaactctcgggggaaggccctggcctctcccagcccccggtgggatgagagagagggaggcagagggccagagctggggccgtaaaacctccagtgacccgtttgccttccctccttcccccaggtgaacggtgtgctcacagccttgcctgtctctgtggccgacgggcggatttcagtgacccagggtgcatcgaaggcactgctggtggctgactttggactgcaagtcagctatgactggaactggcgggtagacgtgacgctgcccagcagctatcatggcgcagtgtgcgggctctgcggtaacatggaccgcaaccccaacaatgaccaggtcttccctaatggcacactggctccctccatacccatctggggcggcagctggcgagccccaggctgggacccactgtgttgggacgaatgtcgggggtcctgcccaacgtgccctgaggaccggttggagcagtacgagggccctggcttctgcggacccctggcccccggcacagggggccctttcaccacctgccatgctcatgtgccacctgagagcttcttcaagggctgtgttctggacgtctgcatgggtggtggggaccgtgacattctttgcaaggctctggcttcctatgtggccgcctgccaggctgctggggttgtcatcgaagactggcgggcacaggttggctgtggtgagtgttgggggagcagaggcggggctgggggcggggtcccatctcttcggggctggtttggtttcactctggtccttctgggtctctttgttttcttttttctctgtttgtctctctgtttcttggtgctcgtctctgggcctcgctttgcttgtctctatctgtctgtttctcattctctagctccctcagtttctgcttgggtctcctggtgtctcgccctctcccatttctttctctgtgtcctctctctgtgtcttgttttctgtctccccctttctctgtctgctccctagtgtctctctctgtctcctcccaccctgttctgggaccccacccctaacacccttctttctgtttctctccttcctgctccttcatctgcccacagagatcacctgcccagaaaacagccactatgaggtctgtggcccaccctgcccggccagctgtccgtcccctgcaccccttacgacgccagccgtatgtgagggcccctgtgtggagggctgccagtgcgacgcgggtttcgtgttaagtgctgaccgctgtgttcccctcaacaacggctgcggctgctgggccaatggcacctaccacgaggcgggcagtgagttttgggctgatggcacctgctcccagtggtgtcgctgcgggcctgggggtggctcgctggtctgcacacctgccagctgtgggctgggtgaagtgtgtggcctcctgccatccggccagcacggctgccagcccgtcagcacagctgagtgccaggcgtggggtgacccccattacgtcactctggatgggcaccgattcgatttccaaggcacctgcgagtacctgctgagtgcaccctgccacggaccacccttgggggctgagaacttcactgtcactgtagccaatgagcaccggggcagccaggctgtcagctacacccgcagtgtcaccctgcaaatctacaaccacagcctgacactgagtgcccgctggccccggaagctacaggtgaggagggctgtgggccagacaggagcaagtgccagctctggggttgcctgagatggtaagggcttcaccattcccctgggcccctttcacagcttagctggggcatgatggaagggtcagagtgtacgcctaggagcctgatggcttggcacagcagcttcttcctctgtgagcctagtgtattcctctgtaaactggtctaggaaaagtacctgttttcgagaaggataaggagtcagtgacatgagccagtagaggctctttgtttttcttttctttttttctttcttgcttttctttctttctttctttcttttcttagcctgactctgttgcccaggctggagcgcagtgacaggattagggctcactgcagcctggaactcgtgggctgaatcgatcctcccgccttggcctccacctcccaagtatctgtgactaaaggcacacgccaccacgctggctaatttttcatttttttgtagagatgggggtctcactatgttgcccaggctgatctgaacttctggcgtcaagcgatcctcccatctcggccttccaaagtcctgggattgcaggctttgccaccaggcccggcctatagatgctcattattattttcagcgggaggtgacatgctctgggtcccacagctagtaggtagtggggccaggattcaaacccgtgtttgctccgttcaccgctcccccactgcccacaggtggacggcgtgttcgtcactctgcccttccagctggactcgctcctgcacgcacacctgagcggcgccgacgtggtggtgaccacaacctcagggctctcgctggctttcgatggggacagcttcgtgcgcctgcgcgtgccggcggcgtacgcgggctctctctgtggcttatgcgggaactacaaccaggaccccgcagacgacctgaaggcggtgggcgggaagcccgccggatggcaggtgggcggcgcccagggctgcggggaatgtgtgtccaagccatgcccgtcgccgtgcaccccagagcagcaagagtccttcggcggcccggacgcctgcggcgtgatctccgccaccgacggcccgctggcgccctgccacggccttgtgccgcccgcgcagtacttccagggctgcttgctggacgcctgccaagttcagggccatcctggaggcctctgtcctgcagtggccacctacgtggcagcctgtcaggccgctggggcccagctccgcgagtggaggcggccggacttctgtcgtgagtactgctccatgcatggtccacatggttgggtctctccctgcccttcccaggactgtaggacagcagccccttcctcctccatggggctcaggggccactttccttcccgagctcggtatctactgtcaggaaacaccttggcactgacacactgaaatgccccaagtcaggtactgcagtgagagagagtcagttagaaacacctagtcagagtgtgggcgcggtggctcacgcctgtaatcccagcaatttgggaggccgaggcgggcggatcacctgaggtcaggaggtcgagactagcccggccaacatggtgaaaccccacctctactaaaactacaaaaattatccgggcgtggtggcgggcacctgtaatctcagctactcaggaggctgaggcaggagaatcacttgaacccaggaggcagaggttgcagtgagccgagatcgtgccactgcccttcagcctgggtgacagagattccatctccaaaacaaaaaacaaacaaacaacaaacaacagaaaaaaaaaaagaaagaaaagaaacctggggtccaggacactcttagggattggtgatccatgctttcaggtatccaaggcatgtagattgggatggctgaccctgcctctgtcacatagcaaagtaccccttgttaggaagacctagtgagtttcagctggtcagagggcccaggtctgttgcacacactgaaatacacctagtcacatggaattagtcgcataccttcagtgatatctgcttaaattttatactgactggtcagatacactcagaaagaaacaggatcctggcatagccttgggcagatccacacagatgcatagttagatagtcctaggcggttcccttcaggcaggtctcctggtcacaggtatcctgccaacttcacccaggcacagccttaggcagaccatgtcagaaggactctgggagatgctgcatgtcagacacccacagctgggtgccctcaggcagagccataccctgagatacatgtggccccacaccccagtcacattcacacgctgagatgcccatagtcagttctgatcctgcataccccgaatagatataagtgatccatttcacccaggtaagcctggcttacatagtgagaccccatctctacagaaaataataataaatcagccagatgtggtggcttactcctgtagtcccagctaatcgggaggctgaggccagaggattgcttgaggtttaggtggaggctgcagcgagctgtgattgcgcctctgcactccagcctgggtgagatagagtgagagcctgtctcaaaaaaaaaaaaaaaaaaaatatcagccaagcagagtcatttgatcttcagaaatatttggtcagagagacctgggcatgtcccctcccattccaggtcccacgctgagtcccccagttagatgtcctggatcacatgtgcatgcccagagacgcccaagttggcctgagcagttttcccactcagggcctcccaagactgcgactcaaacacctacctggctgatgcccaccttgtccccacagccttccagtgccctgcccacagccactacgagctctgcggtgactcctgtcctgggagctgcccgagcctgtcggcacccgagggctgtgagtcggcctgccgtgaaggctgtgtctgcgatgctggcttcgtgctcagtggtgacacgtgtgtacctgtgggccagtgtggctgcctccacgatgaccgctactacccactgggccagaccttctaccctggccctgggtgtgattccctttgccgctgccgggagggcggtgaggtgtcctgtgagccctccagctgcggcccgcatgagacctgccggccatccggtggcagcttgggctgcgtggccgtgggctctaccacctgccaggcgtcgggagatccccactacaccaccttcgatggccaccgcttcgacttcatgggcacctgcgtgtatgtgctggctcagacctgcggcacccggcctggcctgcatcggtttgccgtcctgcaggagaacgtggcctggggtaatgggcgagtcagtgtgaccagggtgatcacggtccaggtggcaaacttcaccctgcggctggagcagagacagtggaaggtcacggtgagagcagatggggagcagggggcgaggggcctgtgggtaggtggggcacaggcagcgctcagcccaggagttgggggcacaagagatgagagtgcatgtgcgaggcctggggtctctgaggacagaagatgccagtcagaaccgagtgggaagccaatgagggaggtgtcatcagggacttgggagctgctcccccatctctgtccctcagtctccaccctctctttacctccatgcattgacttttctctccaaatttctcccaccctctcctccctcccactccatcctctctccacctcagtcctggattctgccctactcacctccctagtctgccacttattggcaggacgtggtgccatcagaggttgagaaagtccgagtttgagaagcttcatggacagaggacaatctgtgggtgacactctcaccgccttaacaacaacaacagcagctatagtttctatacagctgactgcacaccttttggctgccaggcacttcacgtccatggtgtctgtatgcttgcaacagggactgcaggcactatgacttgctttatttttcagagtgggatggcccatcactggcccatagtcccccagcaaaggtggagcttgaaccccgtgctgctctgcagtgcttttcttactgagaagatttggtctcatgtggagactggcatctgagttacagtggaggggtttcccctgagatcccactgaaacagacacgcagctgtttttctagtggcagtattggcgaaggtgctgatcaattactgacttaatctggcgaactggacaggcgtgacttttttttttttttttttggcacagagtctggctttgtcacccaggctggagtgcagtggcgcgatctcggctcactgcaacctctgcctccctggttcaagtgattctcctgcctcagcctccagagtagctgggattacaggtgtgcaacactatgcccaggaaatttttgtatttttagtggggacgggtttcaccatgttggccagtctggtctccaactcctgagctcagtgatctgccggcctcagcctcccaaagtgctgggaatagaggcatgagccactgtgcccggccgacatgcaggacttaattgaatatattccctaatgtttcccaagctcctagaatagcccctgacatacagcgcctaaatacacaggagttgttgatgttcttgttagttgcttcttactgaaacccccagcttccctacagatgtgggagctcttattaccccgcagtttacagctgaggaaactgaggcaaggctaagtcagttgcccttacccaccgcccagccctgcttgggaagtgtggcagttgaccatctttttaggagactcagccaggagcatgtctttctcctgccttctcctctgattcttcacatttccaaaagaatccggtgtgcactgtctgtgataaggaagggtaagaaagcatgttaatcaggggttgatgtatttatttattttttagagacagggtcttgctctatcaccaaggctggagtgcagtggtgtgatcctagctcactgcagcctcaaactcctgctctcaagcaatcctaccacttcagcctcctgagtggctgggagtacaggcatgcaccaccatgcccagttaatttgttttcttttttattttgtagagacaggatctcgatatattgcttaggctgaccttgaactcctgggctcaagtgatcttcccgccttggcctctcaaagtgctgggattatagacatgagccactgtgccctgtccaggggtggatttaccaggctttgttggagcctagtaaatctttaactgaaaccactggtcctcagctcataggtttaagttcatttccccaagaatttagcctaactttccactcgctgatgctttaaagcaaaaacctgtggttctgtttactcttcagaagaaaaacttccactcatagctgctaataacagcaaatgctcctgaagcatgcatgctatgccagccacgtttctcagcactttacagatactaatttatgtgatcctgacaacagttccatggggcaaacgccttattcccacttgatagatgaggaaacagaaacagggagaggtgactcacttgcccaaggtcacaaagagggtaagggggaaactgtttgaactcgggcaagtggctccgggggcgatcattgcttattaatggctgcagcaagcggtaaacaaaggatagctggaggcttgttacttcatcgagacctgtattcgtttcccatggctgccataacaaattaccacgagcttggtggcttaaaacactagaaatgtatgttccacagtcctgggtgccagaagttcaacatcaaggtgtgggcagggctgcaccccctccaaagacactggttgggggatcttcctttccctttccagctctgcagactccaggttctctgggcttgtgacaacaccattctaatccctgccttcatcttcatgtggccttttctgtgtgtctctttgcctttttctttctggctcttataaggatactagtcattggatttaaggcccaatttaatccaggataatctcatgttgagattattaccctgattacatctgcaaagaactttattccgagtaagctcacgctatgggattctgtgtgaatatgtcttttggggaccaccattcaatctactatcaggccctgttattatatccatttaataaataggaaactgagggcctaagaggtgaggtcacaaagatcagcatcaggcatgggcttgaactagggtcccaccctcactcaaagtatactttctgaagcgtggcctgcctctcttcccctcccaggtgaacggtgtggacatgaagctgcccgtggtgctggccaacggccagatccgtgcctcccagcatggttcagatgttgtgattgagaccgacttcggcctgcgtgtggcctacgaccttgtgtactatgtgcgggtcaccgtccctggaaactactaccagctgatgtgtggcctgtgtgggaactacaacggcgaccccaaggatgacttccagaagcccaatggctcgcaggcaggcaacgccaatgagttcggcaactcctgggaggaggtggtgcccgactctccctgcctgccgccgcccacctgcccgccggggagcgcgggctgtatccccagcgacaagtgtcctcccgagctggagaagaagtatcagaaggaggagttctgtgggctcctctccagccccacagggccactgtcctcctgccacaagctggtggatccccagggtcccttgaaagattgcatctttgatctctgcctgggtggtgggaacctgagcattctctgcagcaacatccatgcctacgtgagtgcttgccaggcggctggaggccacgtggagccctggaggaatgaaactttctgtcgtgagtgagggagagccggaggggcagggaggggagagcttgaggcacagaaggggtagaccctgggctttgcagcccctccctccccagggctctgatcggcaccccctccttgcagccatggaatgccctcagaacagtcactacgagctctgtgcggacacctgctccctgggctgctcggctctcagtgcccctctgcagtgcccagatgggtgtgctgagggctgccagtgtgactccggcttcctctacaacggccaagcctgcgtgcccatccagcaatgtggctgctaccacaatggtgtctactatgaggtaggaacctagtcatctggggcagaatatggggtctcacccctcccactgttcatcagccccacggcctgtctacttagcctcttatttatttcttttagagtcagggtctcactcttgtcacccaggctggagtgcagtggtaccatcatagttcactgcagccccaaattccttggctcaagcaatccttcacctcacctcccaagtacctgggactataggtgcgcaccaccaagcccagcgaatttttaattttcctgtggacacatagagatgggggcgtctcactatgttgctcaggctggtcgtgaactccaggcctcaagccatcgtcccgccttggccacccaaagtgctgggattaatggcatgagccaccatgcccgacccactgagcctcttttttttttttttttaaagatatagtcttgctctgttgcccaggctggagtgcaacctccgcctctcgggttcaagctcactgcaacctcagcatcccaggttgaagcaattctcttgtctcggcctcccgagtagctaggagtacaggcacgtgccaccacacacggttaatttttttgtattttggtagaggtggagttttgccatattggccaggctgctctcgaactcctgacttcaagtgatcctcctgccttggcctcccaaagtgcgagcattacaggcgggagccaccacagctagtccactcagtctcttcagtgtctcttgtacccactcctttccccgtccccatggccctcccttggtccagctggtcctctcctacctgggtccctcccagctcctacctctgctccctctggtccaccctccacgtggcagtggtaaagatctttctaaatatgaccacgggctctgaagctttaaaccctcccctgactccccaggtcaagttgtggctttgccttccaggtctggacgaagggagcctttctgaccacaaagacaagatttccatgtgttataccagctgctaacaccctctacttccctctcccactctgtccccgtaggtcctttttctttgactggagcatgtgtttgtctaatgtccatctcccttggggactgtgagctctcctaggggtggaaccctctctctgttgttctcctcacataaataatattaataataacagaaaatgtgtagatagtgcttactatgtatctggtaccgttttaagtgctatgtgtgcatatttttatatatgcattacatatctaaaaactttttattctgaaaacgttcaaacatgcaaaaattaagagaatagtggaatgactgtccatgtacttacccatcacttagcttcaaaaataagccatattctcccgatcttgtttgatgtctaccccacgtatctctcctatctgaatgttttaaaggaaacccttttctgtttttgtttttgtttttccttgagatggggtctcgctctgtcactcaggctggagtgcagtggcgcagttttgcctcactgcaagctccgcctcccgagttcacaccattctcctgcctcagcctcccgagtagctgggactataggcgcccgccaccacgcccgactaattttttgtatttttagtagagacggggtttcaccgtgttagccaggatggtctcaatcttctgacctcgtgatccacccgcctcggcttcccaaagtgctgggattacaagcatgtgccaccgcgcccggcctacccttttcattttatctaaattttacatgtctgaatataacttggttattatctgaatataacttggttattatctgaatataactcagttatatttccaaaggcaggcgctactatcatctgcaatctgcagatcatgaaactgagccataaagaggtgaagtaactgcccagagtcacacactttggaaacagcagaaacgggcttcaagcccaggcgatctgcccttagttactgtgtcacaccatttctcctacagcagacgttgagtggatattttggaatgaatgagtaaatgaagaaaagtgaatgaaccaatgaatgatggccccaaagccatgctgtgcctcagcttcacagacaaggggccatcctgctgagagatgtcccttgtctgtgatgtctgccaaacccctctgtgccagaacgccagagatgtgagagtcggctcccacccgtggtgtccctgatggccgttccctctctccccacagccggagcagacagtcctcattgacaactgtcggcagcagtgcacgtgccatgtgggtaaagtcgtggtgtgccaggaacacagctgcaagccggggcaggtgtgccagccctccggaggcatcctgagctgcgtcaccaaaggtgctgggctgggctgggctgggactggggctgatgggactagggatggaggatggggactctggggctgagggtagtgtaactggggtgtccatggcgggaggtgtacaggactaatgattgaggttgcagacctggggaaccctagaccaggtttcacagggccagggccacctactttgggaggtagggacccttagggaaaatccaggctgtggggaccctcagagatagttttctcagggtggatgtcagagaccctcggtataaggcagggacaggcgcgcctttgctctaatgtgctacatggtaaatgtttaagctcgcaggctgtaggttctcgttccagctactcactctgccactgtggcatgaaagcagccgtagactatgtaagtgaagaggtcaggttcctataagactttagaatacaagagcagcagcctagggttccatcatgagcggaacactgatgtgtgggatcgggcttggggttcagacactagcaccaaagggcaggggagagattgggatcccaggggcagggacagagagcagagttctgagtctcacgcacggagacctcaccaaggcaggacattggatatggggacccctcttaactggaagatcaggatttctaggggtatagtctctgatgtgggaatcccccagactaaatctgggacacagccacccccagggctcatttcttagggtgaagagcagagaactctcctccccctaaggataagagaatgggagctccagcaccaaggagtgggggctaagactctcagggctgatgagcaggataatggggactcccaggaatggggggtatatcactcagcatctagtcgagagacagaaagcgtatggccatttgaatgaggaaagtttaattaaagaatcacttacttattaataggagattaactattaagggtaaagagggtctggtgccgtggctcacacacccagaactttgggaggatcacttgaggccaggagttcgagaccagcctgggcaacatagcgagacccctgtctccacaaaaaattgaaaattagccaggtgtggtgatgcgtgcctgtggtcccagctatttaggatgctgaggtaggaggatcagttgaccccaggatttcgaggctgcagtgagctatatgattgcaccactgctctctagcgtgggcaagacagcaagaccttgtctctttacaaacaaacaaataaacagaaataagaaacggtaaagagagcactaaagaataccaccaaagcacacacaggaagtagccgccactctagggctaagttaaaagcctcatggaagggagaaattggtccctcctcttcaaggaggggagaatcagccccaaggctgagtccagtctcactgcagctgtagcccactgggtggcacagaggtttctgcaggctggacttggcaagaagggaacccctcactgggaagccagctgcggccagtggcactcgctgaatgtggccccgcaccctggccagagctgaaaggaccaaactggctagaagccagacccggagaccctccctcctgcagtgactctccggcgccctctgttgacaaagcttaactccgtgggtgtatttgaagctgagaggcggtacattgataatggacacaggaggaaggagacgtttgaaggctggcctctcccacacaggggttccgcaagctggggtcacagatgtagtaactgtacgaacagggtctcggacacagaaaccccccaggacagggcctcagcagtgagacacgatgaaggctactgtcttgaatacagcaaccctcagggatggagtcttgcactgagggagcccagcccatgagacttagctagttagggtctcaaacatttcaaatcctgctgagaccctggcactgggctcttgccagaagatcaccccagggccctagtcttgggcatagaggcctccaggacctagagaaattggagaccaatttctatcaaatgtggagatgtccagggggctgaggtctcaggcatgggggaccctgagacctagatcttttttttttttttgagctaaggtctcactctgtggcccaggctagagtgtagtgtagcttactgcagcctcgatttcctgggctcaaacaatcctcccgcctcagcctcccgagtagtgggggactacaggcacacaccaccacgcctggctaatttattaatctttctgtagaaatggggtcttactatgttgcccaggctagtctcaaactccagggctcaagctatcctcccacctcagcctcttaaagtgctgggattacaggcctgagccaccacacctggcctggggcccaggtcttgaacacagagaaccctggggctgggatctcagacatggatgctctcagggctggcatcgcagacacaaggacccctggggcacagatctcaactggggtcaagtgcaccttttctctaaagggctagatggtaagtgtttaagcttgcaggctataccttctggatcacaactactcactctgccactgtggtgtgaaagcagccgtagcctatgtaagtgaagacggtgaggttcctataaaacttaaaatacaagaacagggtgaaatctcaagcaagggcaccatggaaagtgcaccttaaacacagacccagagccttggtctttgccttggtcttaggtgcgtggactccaggatctcagtctcacacagcaaatggcagggcctcagtctcagaggtaggggaactctaggtactgggtcttggctgtacagacctctggggcccaggtctccggtatgggacctttgacagccgagacttagacacagtcccccatggggcctcagtgtcagctgtgtgcgactcccaggggctggtcttgaaaatagcaggctgggcatgatggctcatgcctgtaatcccaacactctgggaggccaaggttggctgatcacttgatgtcaggagcccgagaccagcctggccaacatggtgaaaccctgtctctactaaaaatacaaaaatcagccaagcatgctggtgggcacctataatcccagccactcaggaggctgagtcaggagaatcactggagcccaggaggcagaggttgcagtgagccgagattgtaccattgctctccagcctgggtgacagagaaagactccatctcaaaaaaacaacaaaacaaaagaaaatataaaagcaaactataggaagtgggtcctagacatgaggactctggaatgtggtcttgcctgcagtaaccctcagatccctggcacagactgggtagatatggagggagcggccatgctttacaatgggcagcccctcaaggtcctcctccctcttctgtccccagacccgtgccacggcgtgacatgccggccacaggagacatgcaaggagcagggtggccagggcgtgtgcctgcccaactatgaggccacgtgctggctgtggggcgacccacactaccactccttcgatggccggaagtttgacttccagggcacctgtaactatgtgctggcaacaactggctgcccgggggtcagcacccagggcctgacacccttcaccgtcaccaccaagaaccagaaccggggcaaccctgctgtgtcctacgtgagagtcgtcaccgtggctgccctcggcaccaacatctccatccacaaggacgagatcggcaaagtccgggtatgtgtggcaggatggtcccctgaggtccccgggagggcaggagggatcctgacgaccacagttagcagctcaaggctctttgtcttcacctgggcctgaaacaaactgtcaacaaaaagaataattgcagcaaaaatgtcaccctgttactgggaattaaatgagcctagcccctggcaaagggctttaacataggacctcagcatttgccttttttatagacctgggtttcaatccagcctctcctccttatgagctatgtgatgctgggcagttcacttggtaggcctcagtttcctcatctgtgaagtgggcatcgtatcagggcctcccccacagcaaggccgtgcatgtcacatgctgagctcagagtctagtccaggtgaacagtcgtttgagtgtttgtgagggaacaagtgagagacccagagaccaggacacagagagaaatacagggagatcgggctaggtgcggtggctcacgcctgtaatcccagcactctgggaggccgaggcgggtggatcacctgaggttagtagttcgagaccagcctcgccgatatggtgaaacccccatctctactaaaaatacaaaaattagctgggtgtggtggtgctactgtaatcccagctactctggaaactgaggcaggagaatcacttgaacctgggaggtggaggttacaagagccaagatttcgacactgtactgcagcctgggtgacagagtgaggatctgtctcaaaaaaaaaaaaaaaaaaaaagaaagaaagaaagaaatatagggagatatgtagggagatcagaggagacagatgggctatcctttctgcccagggaaatggagatagagcttaatggtagctcacagagagaaaatgagggatggaacagagtaggcactggataaatgatggtgagtgagtggaagagacacacagagaatgagggtaggagggaggaagggaagaggagggagagatagacagagagacagaaagagagagagagaagaccaagtgatatagacttaggtgaagacagagggagagagacacagaaagacagagagacagagagacagaagagggagatagagatgaagggagaagatctagaaaaagtaaagtgaggtttcgttccccaagacctgggctagaacaactgtccacagtgtgtcagatgacaatccaactctcgggggaaggccctggcctctcccagcccccggtgggatgagagagagggaggcagagggccagagctggggccgtaaaacctccagtgacccgtttgccttccctccttcccccaggtgaacggtgtgctcacagccttgcctgtctccgtggccgacgggcggatttcagtggcccagggtgcatcgaaggcactgctggtggctgactttggactgcaagtcagctatgactggaactggcgggtagacgtgacgctccccagcagctatcatggcgcagtgtgcgggctctgcggtaacatggaccgcaaccccaacaatgaccaggtcttccctaatggcacactggctccctccatacccatctggggcggcagctggcgagccccaggctgggacccactgtgttgggacgaatgtcgggggtcctgcccaacgtgccctgaggaccggttggagcagtacgagggccctggcttctgcggacccctttcatctggcacagggggccccttcaccacctgccatgctcatgtgccacctgagagcttcttcaagggctgtgttctggacgtctgcatgggtggtggggaccgtgacattctttgcaaggctctggcttcctacgtggccgcctgccaggccgctggggttgtcatcgaagactggcgggcacaggttggctgtggtgagtgttgggggagcagaggtggggcggggggcggggtcccgtctcttcggggctggtttggtttcactctggtccttctgggtctctttgttttcttttttctctgtttgtctctctgtctcttggtgctcatctctgggcctcgctttgcttgtgtctatctgtctgtttctcattctctagctccctcagtttctgcttgggtctcctggtgtctcgccctctcccatttctttctctgtgtcctctctgtgtcttgttttctgtctctccctttttctgtctgctccctagtatctctgtctcctcccaccctgtcctgggaccccacccctgacacccttctctctatttctctccttcctgctccttcgtctgcccacagagatcacctgcccagaaaacagccactatgaggtctgtggcccaccctgcccagccagctgtccgtcccctgcaccccttacgacgccagccgtatgtgagggcccctgtgtggagggctgccagtgcgacgcgggtttcgtgttaagtgctgaccgctgtgttcccctcaacaacggctgcggctgctgggccaatggcacctaccacgaggcgggcagtgagttttgggctgatggcacctgctcccagtggtgtcgctgcgggcctgggggtggctcgctggtctgcacacctgccagctgtgggctgggtgaagtgtgtggcctcctgccatccggccagcacggctgccagcccgtcagcacagctgagtgccaggcgtggggtgacccccattacgtcactctggatgggcaccgattcgatttccaaggcacctgcgagtacctgctgagtgcaccctgccacggaccacccttgggggctgagaacttcactgtcactgtagccaatgagcaccggggcagccaggctgtcagctacacccgcagtgtcaccctgcaaatctacaaccacagcctgacactgagtgcccgctggccccggaagctacaggtgaggagggctgtgggccagacaggagcaagtgccagctctggggttgcctgagatggtaagggcttcaccattcccctgggcccctttcacagcttagctggggcatgatggaagggtcagagtgtacgcctaggagcctggtggcttggcacagcggcttcttcctctctgagcctagtgtattcctctgtaaactggtctaagaaagtacctgtttttgagaaggatgaggagtcagtgacatgagcctatagaggctctttgttttttcttttctgtttttctttctttctttcttttcttagcctgactctgttgcccaggctggagtgcagtgacaggattagggctcactgtagcctggaactgctgggctcaatccatcctcccgccttggcctccgcctcccaagtggctgggactaaaggcgcaggccaccatgctggctaatttttcattttttttgtagagatgggggtctcactatgttgcccaggcgggtctgaacttctgacctcaagtgatcctcccatctcgtccttccaaagtactgggattgcaggctttgccaccaggcccggcctatagatgctcattattattttcagaggggaggtgacatgctctgggtcccacagctagtaggtggtggggccaggattcaaacccgtgttctctccactcaccgcgccccatccccccgccgccatcccccgcccgcaggtcgacggcgtgttcgtggctctgcctttccagctggactcgctcctgcacgcacacctgagcggcgccgacgtggtggtgaccacaacctcagggctctcgctggctttcgatggggacagcttcgtgcgcctgcgcgtgccggcggcgtacgcggcctctctctgtggcttatgcgggaactacaaccaggaccccgcagacgacctcaaggctgtgggcgggaagcccgctggatggcaggtgggcggggcccagggctgcggggaatgtgtgtccaagccatgcccgtcgccgtgcaccccagagcagcaggagtccttcggcggcccggacgcctgcggcgtgatctccgccaccgacggcccgctggcaccctgccacggccttgtgccgcccgcgcagtacttccagggctgcttgctggacgcctgccaagttcagggccatcctggaggcctctgtcctgcagtggctacctacgtggcagcctgtcaggccgctggggcccagctcggcgagtggaggcggccggacttctgtcgtgagtactgctccatgcatggtccacatggttgggtctctccctgcccttcccaggactgtaggacagcagccccttcctcctccatggggctcaggggccactttccttcctctgagcttggtatctcctgtcaccaaacaccttggcactcacacactgaaatgccccaagaaaggtactgcagtgagagagagttagaaacacctagtcagagtgtgggcgtggtggctcacgcctgtaatcccagcactttgggaggccgaggcaggtggatcacctgaggtcaggaagttgagactagcccggccaacatggtgaaatccctgtccctactaaaaatacaagatttatctgggcgtggtggtgggcacctgtaatcccagctaatcaggaggctgaggcacttgaacccaggaggcagaggttgcagtgagccatgatgtgacactgcattccagcctgggcaacagagtgagacaccatctcaaaaaaaaaaaaagaaagaaagaaaagaaacacctagtcagaaacctggggtccaggacactgttgaggattggtgatccatgctctcagatatccaaggcatgtagattgggatggctgactctgcctcagtcacacagcaaggtacccctggttaggaagacctagtgagttacagctggtcagaggcccttggtctgttgcacacactgaaatacacctagtcacatagaataagtcacataccttcagtggtatctgctcagattttgtactgagactaactggttagatacactcagatagaatcaggactcttacatagccctgggcagatccacacagatgcatggttagatagtcctaggcggttcccttcaggcaggtctcctggtcacaggtatcctgccaacttcacccaggcacacccttaggcagaccatgtcagaaggactctgggagatgctgcatgtcagacacccacagctgggtgccctcaggcagagccataccctgagatacatgtggccccacaccccagtcacattcacacgctgaggtacccatagtcagttctgatcttgcataccccgaatagatataagtgatccatttcacccaggtaagcctggcttacatagtgagaccccatctctacagaaaactactaataaattagccagatgtggtggctcatacctgtagtcccagatactcggggggctgaggcaggatgatcgcttgagcccaggaggtggaggctgcagtaagcgcgcctctgcactccagcctgggtgagatagagtgagaccctgtctcaaaaaaataaaaaataaataaataaataaataaataaaaatcaggcaagcagagtcatttgatcttcagaaatatttggtcaggctaacacataacctggtcagagagaccagggcatgtcccctcccattccaggtcccacactgagtcccccagttagatgtcctggatcacatgtgcatacacagagacactcaagttggcctgagcagttttcccactcagggcctcccaagaccccgactcgaacacctacctggctcatgcccaccttgtccccacagccttgcagtgccctgcccacagccactatgagctctgcggtgactcctgccctgtgagctgcccgagcctctcagcacccgagggctgtgagtcggcctgccgtgaaggctgtgtctgcgatgctggcttcgtactcagtggtgacacctgcgtacccgtgggccagtgtggctgcctccatgatggccgctactacccactgggcgaggtcttctacccgggccctgagtgtgagcggcgctgtgagtgtgggccaggtggccatgtcacctgccaggagggcgcagcctgtgggccccatgaggagtgccggttagaggatggtgtccaggcctgtcatgccacaggctgtggccgctgcctggccaacgggggcatccactacatcacccttgatggccgtgtctacgacctgcatggctcctgctcctatgtcttggcccaagtctgccacccaaagcctggggacgaggacttttccatcgtgcttgagaagaatgcagctggagatctccaacgcctcctggttactgtggctggccaggttgtgagcctagctcaggggcagcaggtgagtccatgtgagcctgccctgggggtctgaaggcaacacagccccatctagggggttctgagggagacacgaccccaccctgtaggtatgagagggacattcctctaacatgggaactctggtacctaccctggaaggtttggtgaatggtcccaccgtgggagatttttgtgttgttttgtgacagggtcttgttctgtcacccaggctggagtatattggcgtgatcacagctcactgcaggctcaacctgctgggctcaagcaatcctcccacctcagccccccatgcctagctaattttttatttttggtagagatgaggtcttgctgtcacggccaggctggtctcgaactcctgggctcaagtgatccacctgtctgggcctcccaaagtgctgggattataggtgtgagtcaccacgccaggcctggggcccaagaagtttaagggaaacatgacctgacgttaatgggactgagggagatgcagctctggcctgggagtgggacaggacagccttgcctgtggttctgtgagttcctgacctacccgacccttccacccaggtcaccgtggacggcgaggctgtggccctgcctgtggctgtgggccgcgtgcgggtgaccgccgagggccgaaacatggttctgcagacgaccaaggggctgcggcttctctttgatggcgatgcccacctcctcatgtccatccccagccccttccgtggacggctctgtggcctctgtgggaacttcaatggcaactggagtgacgactttgtcctgcccaatggctcagcagcgtccagtgtggagaccttcggggctgcatggcgggcgcccggctcctccaagggctgtggcgagggctgcgggccccaaggctgcccagtgtgcttggcagaggagactgcaccctatgagagcaacgaggcctgcgggcagctccggaacccccagggccccttcgcgacctgccaggcggtgctgagtccctctgagtacttccgccaatgcgtatacgacctgtgcgcgcaaaagggtgacaaagccttcctgtgccgcagcctggcagcctacacggcggcctgtcaggcagctggcgtggccgtgaagccctggaggacagacagcttctgccgtgagtgtccgtgggtccctcgcaggactctagaccaggtgtaggggcccctcctggcccattccttctatttgcatgtcggagtggtttctccctgtaaaagcgctccctccccaccccctcccaccccacacccacacaacttcttctcccacggcatagtccactggcttccctgctatccctctgactgttccttctcagcctcctgtctgggcccactctgctcaaacctcaaattctcttcttccctagtgttctattctggactctttctgcagtgacctgaaagggagagttggatgggttgggagatctgtggctcacacagaccctccttctacccccgacaagaccatatcccctcagatccccccaagacaaggctgcaggctattaaacaccccgctaaactaggactgtacctctcattcaattccccatgggagggacatcaccagagactctcaggaaaaagcaatggccccttcggctccaggtcagagccaggtctcccctgggcaggacctatacccagggcggtcatccacacccgcggccttagatttgttctcattgttgaccatggacctggtctgtctgtctcaagccctgaactctctcctgactgtcagcccagtgatcctgatttctgacttctggccttcagaactgtgggagaatgaatttcccctgtttaagctacaaagtctgtggtaattgttagggtgtccaagacaccttcccctgggtgtccttaccgtccctcttacctgctgtgttcccaaataaaatcagcatttcacccccagcctgatgctccttccccaaacctggtgggcattgcagaacagccacacctccaccaattgcttagccagagaccagggacttaccacagataattcccttgggtccatatagcccctgtcccaactctgacccctctgcctgtgcccccctatcccagccctgacccctttgcctgtgccccccacaccctggccctgacccctctgcctgtgccccctacccagccctgacccctctgcctgtgccccctaccccggccctcaaccctctgtgtgtaccctccccatcccggccctgacccctctgcctttgcccccccaccccagccctgacccctttgcttgtgcccccaaccccagccctcaaccctctgtttgtgccctccccatcctggcgctgacccctctgcctgtgtgcccccactctggccccgacctctttgcctgtgcccccgaccctggtcctgacccctctgcctgtgccccctaccctggccctcaaccctctgtctgtgccctccccatcccagccctgacccttctgtctgtagccccctaccctggccctgacccctctgcctttgccccctcatgcctgccctgacccctctgcctgtgcctccccaccctgaccctgacctctctgtctacactccctgatgcagcatgttcactttgggctcttcctgtctgtcccactggaagtgagctctgtaggactggggttgagacttttctcagtatttgtgtcctcagcaccgcctaaaacagggctgggtgtgcagtaggcccccttggttatccaggaccctttggaggtgtgactcagccctgcctcctctctctgcagcgctccattgccccgcccacagccactactccatctgcactcgcacctgccagggatcctgtgcggctctctccggcctcacgggctgcaccacccgctgttttgagggctgtgagtgcgacgaccgcttcctgctttcccagggtgtctgcatccctgtccaagattgtggctgcacccataatggccgatacttgccggtgagtaggggcttggggtgggcagagagggtagaagagcttgagagagacccagagattctgtgctgacctcttcaaggctggggacagaggaggtaccgccatatcccagctatgtgacttgatgcaggcaacctccccctattagtctcctgcagcttctgtaaccaattaccgcagacatggtagcttaaacaggagaaattcattctcccacagttctgaaggccaaaagtcagaaatcaggaatactgggctgacatcaaggtgttggcaaggtggcactccctccagagaaatctaggggaggccatgcccagtggctcatacttgcagtcccagccctttgggaggccaaggcgggaggatcacttgagcccaggaattcaaaaccagcttgggcaacatacaattgtttttttaattagctgggcatggtggtgcacacctatagtcccagctactcaagaggctgaggtgggacaatggcgtgaccccaggagttggaggctgcagtgagctatgatcacgctgccgcactccagcctgggtgacagagcaagaccttacctctaaagaaaaaaggaaaagagccaggcacggtggctcacacctgtaatcccagcactttgggagactgaggcgggcggatcacgaggtcagaagttcaagaccagcctgaccaacatggtgaaaccctgtctctactaaaaatacaaaaattagccgggcatggtggtgcgtgcatgtaatcccagctactcaggaggctgaggcaggagaatcacttgaacccaggaggcggaggtggcagtgagccgagattgcgccactacactccagcctgggtgacagaccgagactccatgtcaaaaaaaaaaaaaaaagaaaagaaaagaaaagaaaaaagaaatctaggggaaaatctgtttgttgcctcttccagttgctggttgctgcaggttttccttggttgtggccacatcacaccaacctctgcctcctcttctgagtgtgtcataacacctccctctgcttctctcttataaggatacacgtgattgcatctaaggctcactcagataatccaggagaaattttccatcttcagatccttaattcaatcacatctgcaaacacacttttcccatataaggtgacatttactcattacagggattaggacctgatatcttggggcgggggcatcatttggcccctccttgaactgcattttcttcacctgtaaaatgggactaatcaccatctttgtaccataggtatctgaggatcaggcccgattatacaggaaagatacccactgagcactgggccttgccctgcatgttcatcacactcagtaaaaagaaagagcagtttacagcggggcgcagtggctcacacctgtaatcccagcactttaggaggccaaggcgggcggatcaaaaggtcaggagttcgagaccagcctggccaatatggtgaaaccccgtctctactaaaaatacaaaaattagctgggtgtggtggtggacacctgtagtcctagctactcgggaggctgaggaaggagaatcccgtgaacccgggaagtggaagttgcagcgagccgagattgtgccacagcactgtagcatgagcaacagaccgagactccatgtcaaaaagaaaaaaaaagaaatagcagtttacaacagtgcaaataggtagcccagctaataattgtttaataatatgaattaaattgaagaattgatttattcttgttaataatttttttgagctcttactatgcaccatgtttgttatgggtgttattatttatttatttatttattgagataggattgcactctgtctttcaggcaggagtgcggtggcatgatcacggcttactacagcctcaaactcctgggctcaagcgatctttctgtctcagcttcctgagtagctgggaccacaggctcacactgccatccctggctgactatttaatttttatgtagaaatgggatctcgctatgttgtccaggctggtctcaaactcctgggctcaagcaatcctcctgccttggcctcctaaagtgctgggattacagggatgagccacctctcccggccatgttctggatgttaattcatttaataatcacaacaatcctatgcaatagatactatgactattttccccattttacagatgaagaaattgtgacatagagaagtcagcccgaggctagccattaacatgcagcactaacttgcattgcttgcaaatggagccaaattttgctctttccttgaggtctcactgcctactggaagccatccttgatcccctaggctgggttaggtgcctcctctgaacccctcagctccctatgcttccccatctctgccctgacccctctgcctatgcccgaagtcttggatttgtgagtctggccttcatgggagaggtctggcctagagatgtggaaatcatcattgtagagatggcatttattttgttaattacatttcttcatttcttacctgtatcagttagcttttgctgggttacagatcactccaaaacgttgtggcttaaaacaattattcatttagtttgcaattttgtgactgcagtttaggctggacttggctgggtggttcttctgctatcctctgggcttactcatgtataatatctgtagtcagctggtgggtcagctgaaggctgcctggtctagggtggcctgagctggaagagttatctatgttccatggggtcactcatcttctagggagctagcccaggcttgttctcatggtggctgggcaggattctgtgtatgtgagagagagagaaggaaagagaagctgtgaggtctcttgaggtctaggcttaaacctgttacaacattgcttcttctgtgtttcattgacctaaatatagtcttacggccaacccagattcatagggagggggaaataaactctatttcttaatgggagtctgtaaagtcactctgcatggatacagagggttcaagcagtgtggccatttttgcgatccatcccaccaccataacctggcccctttctgtgcacaggtaaactcctccctgctgacctcagactgcagcgagcgctgttcctgttcctcaagctctggcctgacatgccaggcagctggctgcccaccaggccgtgtatgtgaggtcaaggctgaagcccggaactgctgggccacccgtggtctctgtgtcctgtctgtgggtgccaacctcaccacctttgatggggcccgtggtgccaccacctctcctggtgtctatgagctctcttcccgctgcccaggactacagaataccatcccctggtaccgtgtagttgccgaagtccagatctgccatggcaaaacggaggctgtgggccaggtccacatcttcttccaggatgggatggtgacgttgactccaaacaagggtgtgtgggtaagtttgtgagtagggggtagggaatgtctccctgggcttttgctcttctgattacagtgtccccacattcctggcttcctttctgtcttgcgatctgttttctttatccaggtctctgcggtttagtctctggatttgtatttatctcaatatttcaaacttggtccctctgttctggctgagttctagaggagcaaaaacatactcaagcaacttaatagttttgacattagtatgaatcgagactctatgggttgcaagtgacttaaaaccaaattcaaactgccttaagcaaaattgaatttattagtccatgtagctagaaaatcccaggatagagcctcaggaatggctggatctaggtgccctggcaatattatcagaaatttgtacttccgtctttgagacttgctatttgccaaatcagctttgttctcaaacaggctttccacttacaggtgtaaagacgacccccgcccagctgcccaggcctacaccccaccagcttatctaccttaacagaaaatggttcaataaaagacccaggattatatctcactgagccagtttgggtcacatgcccacccctggagccaatcactgtgactttagggaggaagttccgtgattggtcaaggctgggggtggggggtcacataatgtgtcagggtttcccataacctggttcagtgattcactaggactcacaggactcagcatatagttgtacttagggctaagatgtatcatagggaaaagatacgaagtgaaattgacacagggaaaaggtgcatcgcacaaagtccaggggaaatcatgtgcaagcttccgagagtcctttctcggtagagtcacacaggatgtgcttaattcctccagcaacaaagttgtgatgaaacatgaaatgtcatctgccagggaaattcatagagtctcagtgcctggggttttggtatccacctaccaaaattccagactcctagaaggaaactcccagaagatgctcagcatctttgttcatcactggactataagccgcaggtaggcagggatcctgtccatcttggtcaccagtttgttcccagtacccagatcagggcatggcacctagagggtactcagtaaaaggctggttttgtgaataaactcagccctgctccttttgtgccaggccatgtgctgggtaacagagatgactcggactcagtcgttatacttggaaagcttgcaccctactgagactttccatccactagtcttcatctgtccttcactacacccatcctcccttttcccctccttccttccagcatctattctacccccttctctttttcctatttccttccttctagtctttttcccttccttctttcttccatccacccacccatctgtccatccatccatccacccaccaatccacccatccacccatccatccctccatccatccacccacccacccacccacccatctgtcttttcagatctatctacctatctctccaatcatctggcagaggaaaactcagatacaaaagcatttagagggctgggcatggtggctcatgcctgtaatcccagcgctttgggaggccgaggcgggcagatcacttgaagtcaggagttagagaccagcctggccaacacggcaaaaccctgtcactactaaaaatacaaaaattagccgagcatggtggcacatgcctgtagtcccagctaaggcaggagaatcacttggacccgggaggcggaggttgcagtgaactgagatcgcgctattgcactccagcctgggcgacagagcaagactctatctcaaaaaaaaaactaaaaccaaaaccaaaaaacaaaacaacaacaacaacaacaaaaaacaaacaaacaaaagaaggatttacaaaaaaaaaaaaaaaaaagacaagtcttttaaggaagtttctctagggaatctaactttagaagggttaattcaccaactaacatagacaacagttatgtaaaggaaaaactcacaaagttactggatctgcagcctatgatgaagaaaaagtaattttctcacatgattattatatttgctaaagtcattacttatcttcagacatcagcattgcaaaaataaaggataacgttgttttggttagggaaccaataacttacaggatgtgctcaaagtttgttttattttgcaaactagaaccaggctgagggaggcagatcacctgaatccaggagttcaagaccagcctagacaacacagtgagaccctatctttagaaaaaaatacaaaaattagcctggtgtggtggcacacatctgtagtcctgtagtctcagctactcagaaggctgaggtgggaggattgattgagtctaggaggtcagggctgcagtgagctgtgattgcaccactgcactccagctgggatgacaaagcaaaaccctatcttaaaaaaaaaaaaaagaaaagaaaaagaaaactagaaccataaggatgaccctggggtttgattgtttgtctgtctgtttgcttatctgtctggtacaaaatgcttcccccaccgactttggggtgttgtgtagatccatgggtacgtctctccatccctccactctccatccttttatccgtctatccagatctctagctatcttctcatgtatccattgctccaaatagtgcaaacatccaggtcttcatctctttcagcacctgcctctttgatttagctccatgaacttatcttgtttggggtctccatcctccatcctggtaacacccagctattctggggctgtggcctcacctctgtgtttgctgggcatcccccaccaggtgaatggtctccgagtggatctcccagctgagaagttagcatctgtgtccgtgagtcgtacacctgatggctccctgctagtccgccagaaggcaggggtccaggtgtggcttggagccaatgggaaggtggctgtgattgtcagcaatgaccatgctgggaaactgtgtggggcctgtggaaactttgacggggaccagaccaatgattggcatgactcccaggagaagccagcgatggagaaatggagagcgcaggacttctccccatggtgagggatgtagtatggaaaccaggcttcttggggcaaaggcacctggatcctcatgggatgagggcagtcagggtgggtgtttagtctgcaagcggaggtgctaaatgtctgtgtcttgcagttatggctgatcagtcatccaccaggaacgaagatttcctgaagaagacctggtccctctggaggttgcagtggctgaaggatgcatcatgtgctcctaccctgctctaccgcttttctgggtcacagaggccaaatgtgagagcattgaataaatatcttaagct

SEQ ID NO: 167 - DNA, 25049 bp, Homo sapiens; identical to SEQ ID NO: 112

SEQ ID NO: 168 - DNA, 1747 bp, Homo sapiens
gccacattcaccgcttactccattgcttgctggaagggagtcaggtggttattcaaagatgctttttctttaagagaatggctatattaagtacgcagttttcagcacttttagtaaagcgagctctactctgaacaaaaccagcaacccgagaagcgataatgatgtgaagacagttgaggagcacatccctggcgtaagactggactgcctgtggtccaaaccatgcttcaccacgtcagtatactcatctttaaaattaagatactaatatgtgccatctcagcgcggttgtgtagattagttactatatttaaaatgcctgctacaccataagcagcaaatgttagatactgttttaatctttggcatatatcatgatacatttgctacagtggggtaggggtaagcgtgggggtctagggcagttagacacagtgggccatttagggacagaataccccagtacacgtgtacttaggagtatttcagttctccgtggctagtaaagccaagggatcaggtagggtgaatgagtccttcccaaggtcacctagcattgatggcggagacactcggcgttttctgggccgaatcccttcccatcagccaccggcgggtttgggagggtgtggaagagtgttggagtcaccttaagtgcccttaattcctcatcctggcattagggttcaggagtagagaagggagactaagcgggacgcttcagtatgcgcccttggggctgaaggaacctccccgctaaacctcggtttccctgaccccaaagggcagcgctcactggggaagcggcgccgccagctgccaggacgctcccgcgcagcccggtttccctacgccggggcggggcagaggggcggaaggggcggggcggccgggccgcggcggcctccgactggatacggcggatcgccgggggcctgagggtggagtcccggccggaggcaggccgggactctggtgggtctaggcgcggatcggacccaagcaggtcggcggcggcggcaggagagcggccgggcgtcagctcctcgacccccgtgtcgggctagtccagcgaggcggacgggcggcgtgggcccatggccaggcccggcatggagcggtggcgcgaccggctggcgctggtgacgggggcctcggggggcatcggcgcggccgtggcccgggccctggtccagcagggactgaaggtggtgggctgcgcccgcactgtgggcaacatcgaggtgaggccgggccgagggcggggacgtcgcgggcgggtcgtttccccggagtcgggttcacctgcccgccacgccggggccctttgctctagtcggggcggcctctcggatcccttaaggcaggcttctcccttccccttaagtctcatctttgaaggagccgtttgccctgacagcccctgctcgagttaccgaatctccgaccccggcatctccccacccgcccctcgggtctccccagggtattggcccgaggaaggggaagccggaggtcgggggtggtggtctcgcccctgtggccttctcgcccccggcggccaagtgcctctaatctccagaagtcacccaccacgcagggcaaggtggctggccaaccagatgggcaggagccaggactgaggttggggttggggtgggagctttactgaagagcctcagccccgccccctcacctcgggggtaactcatgcccagtggcatgaggaatgaatggaatattc

SEQ ID NO: 169 - DNA, 2012 bp, Homo sapiens; identical to SEQ ID NO: 164

SEQ ID NO: 170 - DNA, 1566 bp, Homo sapiens
gtaagctccaggaaggatcccgcgggggacctgacagctcacggtcctggccgacaaccgccctgggagcggaatggatggagcccgcagtcgtcccggcgcactgggcaagctctgctcccactgtggcaggccagatctccattagcaaccagagcagctctcaccaacgcctcactgtcattctgatgcatgtataagttaaacattggagaaactggtgccttaggagaaaggctagaatgtaaagacaagtccattaggatcccgcctgagctttttcaacccctagagtttaattaaaataatggagttgttcttgcacaccttgtaccaggacccactttagattatttccaaggctctgaagcaattgtctagacacctgaccctattaccgttaaagattggcttgagtgaaacactttggctttcgacttgtaaatgcactgaatgtatttaagcactagaaaaacttgtattaataattttgagttggtctggtgagttactccgaccttctccctgtaacctgttgcagaaataaactccgttctttcccagtctgtctgcatctcgttactgaacggcgagaacaagcagtcggacccgggtgggtcggggaacacaacctcacccgcagccgaaacccctcacccgcatcccttcccggcccgtgaggcgtccgcaggcggcggcgctcgggacacggcgttcgcggtgctcgcctccgctgcccgaggggaaaagggcaggagaaatctgaggagtccttgggccaggagccaaagcccctcaagtgcccgggcgcgaaccccaggcgccgagctctcacgtctgtctccgccagtacgctagagccggggtagtgggccagcactcaccggcccagccaatccaggacccgctctgcactgccccacccgccgcgcacacgcacgcgtccttttgcggccgctggcctctgattggctgggacggctgtgggtggggagaagccgggaggactgggtgcgcctgcagggatcggaagccggttggggtgtgagaggttttctcgctctaggtaagcgaaacaagccgggggactgcgagccagggactcgggccgcggggcgggaagaagtggggcagcgcttggccaggccgaaaggactttgggggtgggggctgggagtccgtgtctcgaatgagggaggagaggtggagttgccggggctcaggcccggcctcgagcatgggcggatgagaggagtcgggagccgaggcctagggtccttcgggtgaggggagacggagccagcgaggagatggagcagaagcttgtggagtgagttgccgagcggggaagactcgctgatggggtggtaatgagagacgggggccaggagggtgttgactgggcccgacggcggggagcgaggagcgggagcttccccggagcttggaacattctgaagagcgggctaagcggcaggcgaggcgggataggagagcgagcgctccggtcacggagtcacgacaaggtcacaggaagagaggcggcgaggaaggtcgggaggttga

SEQ ID NO: 171 - DNA, 1563 bp, Homo sapiens
gaggaacggcaaaccaaaaagtccaccttgggtgtcatggtgatggaattggaggcggagaccagggagagcagcgggctaggatctctgagagtctccgcaacatggcggccctggaaccacctgaccggcaggaggcggagctccgccccagctcgctcggccccaccccgctcggccctgcccagcgcactcctagaccggggcgcaagggttgtgaggtgtttgagcgaagcgcctgcgcagggcagcggcgcgcggggcggaggctttataatcacttcgtcgttgccgctcggcttctatcgccgggagggcggttgaggcggtggtggcggcgtcggcggcggccgggcgctggctgaggggcgctgaggcgggagctgtggcggcgctgggcgcccctggctcctcggcctctgccggccatgggctccgagaaggactccgagtcgccgcgctccacatcgctacatgcggccgcacccgaccctaagtgccgcagcggcggccggcgccggcgcctcaccttgcacagcgtcttctctgcctcggcccgcggccgccgcgcccgggccaagccgcaggccgagccgccgcccccggctgcgcagccgccgcccgccccggcccctgccgcggcccagggcccgccgcccgaggcgctgcccgccgagccggccgccgaggccgaggcggaggccgcggcggcggcggcggagcctgggttcgacgatgaggaggcggcggagggcggtggcccgggcgcggaggaggtggagtgtccgctgtgcctggtgcggctgccgcctgagcgggccccgcgcctcctcagctgtccgcaccgctcgtgccgggactgcctccgccactacctgcgcctggagataagcgagagcagggtgcccatcagctgccccgagtgcagcgagcgactcaacccgcacgacatccgcttgctgctcgccgacccgccgcttatgcacaagtacgaggagttcatgctgcgccgctacctagcctcggaccccgactgccgctggtgcccggccccggactgcgggtgagcgcgggggcgtggcgcgggtggcggcgggctgcagccgaggggcgtggctgggggcagcagggaccccgcgtgggtgtcccaagcagggaaacccgcaaggcggcagcttcggcggggtggtaaccatcaggcaagcccagactagtggtgtgaacgcacccgacaccccgccccctgccccagggctcgaggtggctgctaagcattcggtgaggggaagggagctgtccaagttaggagacagggagaggcggtttttttgttgggggaatgccctctgtccggaggtgaggacagtatctttttttttttttctttttttttttggagacggagtctcgccctgccgcccaggctggagtgcaatggcgcgatctcggctcactgcaacctccgcctctcaggttcaagcgattctcctgcctcagcctcccgagtagctgggattacaggcgcccgccaccacacccggctaatttctttgtatttttagt

SEQ ID NO: 172 - DNA, 2768 bp, Homo sapiens
attcttgtcacatcgacttggaaagcttcctcccagtttcctctctgctaatggggatccttccaggccccactctgatgtcctatccatgttcatgctctcccagtccccatcctcagcagtagaccctcaatgcctggtctcactcccggggctcagctccaactgaccttgaaacgctgaggaagggagcgcagaagcttgaccttgatggacagaccaataagggtggccatgctgcagtgcggaatggttggtgtgaaagccacagccactgtactctcggggtcgctaacctggttgtggaggagagatgtcaagagtcaaccaccctcagcccaaggtccctcttcttagtttgttgttttgggcaaatcatccaacttctatgggcctcagtttcaacacccataaaataggcacaacaatctccctccccaaagatacccttcggtgttcgtgagcatagagcacgccagctcctgctgcacagaaacctttctgactctctggaacaactcgctcccctcggaagtgactcacctgaacccgcacctgctctactacgttcaactcctctagcgtcagtggatgctccgggtcattgatggagcgaatcagatgtgggaagtgaaggaaaagggactctgcgcccttgcccacttagaaccctctgccaggaacgccctgctgggatgcggctccaccagctgctcgatatcactgctccccccaccgcaagcccccggaacccgcccgcgcccagcagcggcggatatcgaagatctcgcgtgcgtcgatgctgtcgggaacctgctcgtcctcctcgcctgccgtcacaggccgctccccagagcgctggtagatgagggggttggcattctccaggaggccgccgccgaccccgccgccgcctaccatcgcggaaccaccaccgctgatcctagcaggcgtgcgcttccgctccaacccgcgcacttccggagaacgggaagggggcgtggcgtggcgacggagtcgcgcgagggacacgccgcgttgtgggttctcggcctgaggtgcgagagaagcggtgaccgcggccctggctgctcggacccgggaacatgatggtcgctggagcagaaggcgctgagaagggaccacggcggcgctgggtcgtgcgagccagtagcgggctgaaacgtagaggccagaaccaggtctcagggggcactaaaggcggtcggaggtaatccccacaccgcttcctcctggaagtcaggctggccgggagctcccgtatccaggacggttggtcgcctctggcctggcagggatcctagtgtctcgggacctcccggtgacgcgcctgcctcccctgctgcaccataggcccgggagtacggcgtccccacagcttggaccggcaggggctcgtgaaatgtttgtcaagtggataaatgaccatggccgtggtctccgcgggaggtgaggaaactgaaagccaccgaggaaaaggggggcgctccttaagaagtgccgcggtcacgtgtacgtttcaaaagaatggcgtgactgagtagggaggggaccgcggagaccctcagaccctggactgtaaggagatgaggggccgtgaaggggaacccaggaaactgagtcctgaaagcaaggaggaacttccagaatgaagggcgccgacactccttcctgcctttgctcaagcggttccttcaccccgatcaagttccttcccatttctccatctgggggatcctgaacgtgcacatcctcagagaagccctcctggggtctccaattctagtttattgccccctcctatcgatcccccagcgcgctcatcgggcctgtggacaaggacaggtttgaagagaggattccctggatcgcggaagggctgcaggaatggcacagccccttccgaggatgccaaaggagcccgggcaaaggaaagtggccgtgcccgggcctgcctaccactagatccccacccacctatgactgctcagtcccgctctcctaccacacccacctttcccggcccaagccagcgcaccccgctgactccctgcccagtccaaactccaaggctgggcaaggcactgatccactgctggacagacccggggcagcctctgggtgaacagcagcgtgtccgccggcagcgaaccgagaccagcgagccgaccatgcggctgcacagacttcgtgcgcggctgagcgcggtggcctgtgggcttctgctgcttcttgtccggggccagggtgaggctccctcggaggggcgacagggaccgggctcagatctgccaaatgctgcggaggcagaacctgacagtgcgggagggcaggcgcctgggaggtaggagctggtggagatgacagcgtggaactcgtgagccccacgcaacgcctccccgccgcccaaggtgggctcctagaagcacagaaagggtcgggctgggggacaccacggcaaggaaccagcggagtacaggggccccaggagcgccgggacatgccaggccgggtaggcagcctggggtcggagtgggtgagggattggggtgtggggattcagtccatttccctcttatgattgtggctgtagcgggtgctgccggccggtaataacagtaatagcttctggcagcatctggctctcagtgtgtggcgtccttggccaggggggatgccctgagccctccaaaggggcctcagacaaggatagtggtccttggggaacagaagcccccaggcgccaa

SEQ ID NO: 173 - DNA, 1586 bp, Homo sapiens
aaagggaagcttcatcattgctttgggacgctgaccggattcagacccagcagtgtcacttcgcagccctctgaccctgggctggtggcttgaactccttttattgttgttgttcagattagaatatgggttcatgaatagaagtatgtccctttagggttgctgtgagggttcaacgatgcaaagtgactaaaaagggcctaacacggattaatgttatgtagagtaataggaatatggaaggaaaaataaccctgtttcttgcattttaatttaatccggaatccgcatatcacctaaaatgatcccttttctgggagcattccacattttccaaactgtcatcctgtggtggggtgcccggctaggctatggggagacctggagagttttatgcaaaggaggacctgggcaaatgtgcccattcagcctctcaagagtggagaatgcaaggacgggggcagagccctgtgtctgttctgtccctagacataagagaaacgtggccaacagaccgaggtggggacggggacagggaccggcaatgcaggaaatccgagtgtcacatcctctgcctctcatttgcacactgctccctcgctatgctcaccgctcccgccgatccagggacgtgatccagggactctgggaaatgcaaagctacacacagtggagcgggggctgggggtgtgtagaccgccgggattccgagtttcccggcacgcctaggagagggagaggcaggcaatgtcagggaaattgggcaggcaagacgccagggacgccacgtactgccaggttctcaacgaggtggagccaaaggggcaggccccgcggtgcgcccggcgctgggctcacgggttgctgcacccggcccaggatcgcgggcggtgcagactcagcaggggcgggtgcaaggacgaggcggggcctctgcgcccggccctcttcccggactataaagagagccgccggcttctgggctccaccacgcttttcatctgtcccgctgcgtgttttcctcttgatcgggaactcctgcttctccttgcctcgaaatggaccccaactgctcctgctcgcctggtaagggacacctagctccgcgccttgggatgcccgtttcccagccacagtacagactcttcctgggtttgaagaagtcgcatttaaagttctgagctgaaggggctcctttatttcgttaggtgctttcttcccgatcacgtccctgagaccacttctcgcctccctgtgcctctaagttagagttgagggtactgaggcccaaggctgtcctgctccatgtcacccagttggtcagggggctgctggctgagccccaatgctctgaccaggctctgagcagtcagggtggatgggaagtggggggccattgcctcttcggagttcaggacagaaggttctggcctcctgtcttagccttcctgggctgtgtctggagcctgggaccttgcttgtggggtaaaagcaacagaacacttgcccttcccaaaatgaagggagaggagatggggcttctcttcctctcccctgagtgggaaaggagctctgggggctggtcc

SEQ ID NO: 174 - DNA, 1585 bp, Homo sapiens
ttcttgtggggtttttcccttccaaatgtctcagggcgattccagtgttcccgctagttcctccctcccaggctagaacacaaatccttcccactccctgcctggcaaacaccttctgaccctcaggcccaaggcaatggcccacctcctcccaggctggatggggtctcctcctctctgttcccccagcccctgagcttcctgaggaccaagcttgtggcttcttctccttactcttcctccttggtgtctctatgttagagggccgttagcatctgctggggcctggtcgcattcaccctgctctgccactcactggctgtgtgactctggacaaattaacttctctggacctgcagtttctcctctctacaatgagaatactggagagtccttatcttatgggttgctacagaattaagtgacatctcacacacaacacacttcctacagtccctgttacacgctaaaagtactcaacatgcaacggatacgtcatcagtaaccaccccacgggtttactgtgatgctgcacaattattaagccttggctgctacagagttgtaacctgtctgcacttccaaccggtttgggaatgcaagcagcattcccaagtcccgctttcacccgcgcgctaacggctcaggttcgagtacaggacaggagggaggggagctgtgcacacggcggaggcgcacggcgtgggcacccagcacccggtacactgtgtcctcccgctgcacccagccccttccgcgccgaggcgtccccgaggcgcaagtgggccgccttcagggaactgaccgcccgcggcccgtgtgcagagccgggtgcgcccggcccagtgcgcgcggccgggtgtttcgcctggagccgcaagtgactcagcgcggggcgtgtgcaggcagcgcccggccggggcggggcttttgcactcgtcccggctctttctagctataaacactgcttgccgcgctgcactccaccacgcctcctccaagtcccagcgaacccgcgtgcaacctgtcccgactctagccgcctcttcagctcgccatggatcccaactgctcctgcgccgccggtaagaggctggggatgcccagtgtagactgtagcgctagagaagcaatttctgacccctctttctttctctggtcactcaatttcaggacaggagttgctccttcccaaagagttttggggtatctttctctccattctaggttattcggagccccctttttaccgttaaggagatctgagttaatggcttgctcaagttcccaggaatcggttgtggactgaggaactcggccccgggctcttagtacgccgtcccttgttcaggtatccagggacggttctcacctctgtcttttctccttgcaggtgactcctgcacctgcgccggctcctgcaaatgcaaagagtgcaaatgcacctcctgcaagaaaagtaagtgggatcctctctttcctctaccccttccctgtcctccagcctgtcccctctccaccatcctcaggggaattaaagcagtctggggatgccccattgcgcggaaattgttgcctcctcagt

SEQ ID NO: 175 - DNA, 1608 bp, Homo sapiens; identical to SEQ ID NO: 159

SEQ ID NO: 176 - DNA, 1868 bp, Homo sapiens
tggtttactgccccgtttcagttggagacaagaacggtggatcctggtcacctccacggagggaacacagagaacattcactgttaaatatgacacctataattaggaaaacctatggttttaccatagcagttttacagacgaggttatttttggggtgttgaaaaaacagcaattaaaagcttccaacacagtttattcatgccccaataaattatttccccaccaagtatacgctcttaaagaaacgcctgatgtctggcctcagtgtcctcacgggctaacgtggcaattattaagggtgtagaatttgagcaaactttctaaacctctcctgcatgtcttattctaattccacagccccttaaatcgcctccctgggatccaggcggcttggaaaaaatgaagtctgaacagccagagacctaaggaatcaagtttcatttactaagaaaaactagaaggactgcgattagattaggcaaggtgggaaagggataccggcaagtaaagcgccggaaacttacaacttgggttattttctaactggcgtcttgcaaagggacaccatgtaggtatcccgctcgtcaacttgtaaatgaacttcaggttctctttggtggcaggagaattctgaatgtgagaacctggcggccgttcaacgaccccgccctcggggtccccagggggcgtcctccggcaagcctgatcgtctggggccaaggcgcagggcgagcagggagggaggaggagaaccagggccggtggccccgaaagcacacacaaagcggcctgactcctttggtgggaacttccccggccgccagcggagcgggagcgggagggggcggcggagagggggggcggcggttcccctcgccgaggcggagaacagcgcgcgctaggctctgggcgcgcggcgagcgcagcggccgccgcctcctcccttccccgcctccgccggcgctgcctcctccctccgcccagctcggcctcccttgctccctcccctcctagctggcttcggcggggacggcggcggcggcggcgggcggggagggcgtgcgccggccgagaggtgtcggcggcgaggcaaaggaagtttcaagtggaaggtcgtccgtcggccggcgcgtcctcctgctctcctccgcagcatcatggcggagccgagcggctcgcccgtgcacgtccagcttccccagcaggcggccccggtgacagcggcggcggcggcggccccggcggccgcgacagcagcgccggccccggcagctcccgcggccccggccccggccccggccccggcggcacaggctgtcggctggcccatctgcagggacgcgtacgagctgcaggaggttatcggtcagtgcggcgggcgcggcggggccggcacaggccgggcgccgaggccgggcgggagggggcgcgggatgctgggctagcctgcatgcacgccctggaggcagagaggccggcttcggggcctactggcttcaacagttttttttttttttttttttttttttttaatttttaatgtatttgttcgttctatgagcgttggtgctgcaggaggcggcgcggcggatgtgactcgcactgcagacgagccgcatgctgcaaacttttatctcagggatcgccggggcggtggagcggaggaccaggcggcgccgccgcatcttcctccccccgcgtgccgggaccgcagcccgtggccggtggccacgcggacaggcagccgcgggtggggtgtggttgcgggggccccgccctgggtttccagggccccgggggccgcgtcctgggggactctgcgggcgcagccgctcctctgcctcccgtcgtgaccctctcgtcgt

SEQ ID NO: 177 - DNA, 2315 bp, Homo sapiens; identical to SEQ ID NO: 128

SEQ ID NO: 178 - DNA, 1884 bp, Homo sapiens
agagagatttgagactgattccatcacattccccatctgtgaacgggatcatacctagacagcccagccctagaactgcctggtctgatcctaagtgttccatggagattttgtttttttaatgtaatgaatgattaagtcagcaaatactttacatctcttgtgtgctaggccctgtgccaggtggtgattatgggccctattctcaaaggactcctggtctccgtctgtcacttactttagaaacaagtcatctagccagagccagaagggcactggagatcactaatcaatcccatcattacatagctgaggaaactgaggcccagagagtaactgcaacatgttaaagactacacagggagcaaatttattttctgcttctaagccaggtggtttggccacagataggccaagaagaatacgaacagacaagccttgctgggtttcccactcagtttattactattagaccattccctttttccccactcacatttctgcgcatttccatggtcttcatagaatctaagcctaaaaatagagttttccttgagtctttgggtcttcatttctgaagactctcatgtcacagaaaactttaattaaataaatcgttatgcttttctcttgctaacctttttctacaggcatgtcagctgtgatccttatgatggggaggaaaggcaccccaccttctctgtccctacagtcctaatgccctacccagaatggggttttcaaaatcccaggacacccactctttgtttcttaagcactaaacctatatatagtaaatgtttctggaagtttaacttcagctcttgctgaaattttaaaccctcaatttccagaggaccatcgccaggtgtttttaaaacctcgataggaataagaaatgcttcccagaatggagacttccatcagttctagggagctattagcccccttgccctggctgtaatggagaccgctgtgtctgcctcctttcgcactttggagccaaaagaggaagggaccgcctcccacgtccacagggacctgacttccacctctctgcccagatttgcttatgtcactgtcgccccgggacggggaggtggggagctgagggcaagtcgcgcccgcccctgaaatcccagccgcctagcgattggctgcaagggtctcggcttggccgcggattggtcacacccgagggcttgaaaggtggctgggagcgccggacacctcagacggacggtggccagggatcaggcagcggctcaggcgaccctgagtgtgcccccaccccgccatggcccggctgctgcaggcgtcctgcctgctttccctgctcctggccggcttcgtctcgcagagccggggacaagagaagtcgaaggtgagtgagcctccgggccgggggccgggagaaaaaacctagcccctcggtgtccagcgctcagtgcaatgcaccccttttcccaggctccccgccagatgggcaatccccaggtgcgagagacctcctgaaccccttttgccgccccctccgccgccgggaccccgcccccgaccgtcgtcgtctcgtagttccatctgttggagagccgagacctggtgcttcaggcgggcagaatgactaagggaggaaggtctctctccccgagctcgcactttctccccactgccacctcgagggtcgccttgctacatctatgtcacctccgtgcctgagctgctccccttcagtagggcctaagagggagggcgtcacagaaaaaaatgcccagcgtctgggtgggctgtgcaagttcccagggagagagacaaggagaaaggagagaggcagctgggtggtcctggtcctgaagaactgctgtggggggctcttctacccca

SEQ ID NO: 179 - DNA, 26 bp, Homo sapiens
ggtagtggtagtggtygttgtagttt

SEQ ID NO: 180 - DNA, 21 bp, Homo sapiens
ccrcaattaacctctctctcc

SEQ ID NO: 181 - DNA, 23 bp, Homo sapiens
ggggaggtaggtagggtttatgt

SEQ ID NO: 182 - DNA, 24 bp, Homo sapiens
caacrcccctaaacaaacraacaa

SEQ ID NO: 183 - DNA, 21 bp, Homo sapiens
ygttttggggttgggagygtt

SEQ ID NO: 184 - DNA, 22 bp, Homo sapiens
rcrttctctcctcccrccraaa

SEQ ID NO: 185 - DNA, 22 bp, Homo sapiens
ggggttattggggyggttaygt

SEQ ID NO: 186 - DNA, 22 bp, Homo sapiens
tccctaaccccaaacrcctaaa

SEQ ID NO: 187 - DNA, 21 bp, Homo sapiens
ttgtaggggtgtggatgtgat

SEQ ID NO: 188 - DNA, 26 bp, Homo sapiens
aacttactaaacrctaccracctaac

SEQ ID NO: 189 - DNA, 26 bp, Homo sapiens
ttttgygtatagggtaagaggtggtt

SEQ ID NO: 190 - DNA, 26 bp, Homo sapiens
aacaacatccrcatcttacraaacaa

SEQ ID NO: 191 - DNA, 27 bp, Homo sapiens
aaatttaggtyggtaggatygttgtat

SEQ ID NO: 192 - DNA, 24 bp, Homo sapiens
aaactcccaactcrtctcrccraa

SEQ ID NO: 193 - DNA, 22 bp, Homo sapiens
ggtttaaaggttyggygaggta

SEQ ID NO: 194 - DNA, 25 bp, Homo sapiens
aaccccractccataaacctaaatc

SEQ ID NO: 195 - DNA, 21 bp, Homo sapiens
ggaggtggggagttgagggta

SEQ ID NO: 196 - DNA, 26 bp, Homo sapiens
cctacaacaaccraaccataacraaa

SEQ ID NO: 197 - DNA, 20 bp, Homo sapiens
gaagaaagaggaggggttgg

SEQ ID NO: 198 - DNA, 20 bp, Homo sapiens
ctacaaaccctctacccacc

SEQ ID NO: 199 - DNA, 26 bp, Homo sapiens
ygtagagtagttttattttyggggtt

SEQ ID NO: 200 - DNA, 21 bp, Homo sapiens
rcctccttacrcaactcctaa

SEQ ID NO: 201 - DNA, 23 bp, Homo sapiens
ttgttyggattygggaatatgat

SEQ ID NO: 202 - DNA, 22 bp, Homo sapiens
catttcacraacccctaccrat

SEQ ID NO: 203 - DNA, 24 bp, Homo sapiens
tttaaggttgggtaaggtattgat

SEQ ID NO: 204 - DNA, 19 bp, Homo sapiens
ctcccaaacrcctaccctc

SEQ ID NO: 205 - DNA, 44 bp, Homo sapiens
agcacccggatggcgtagaggggagagggtatagggttagataa

SEQ ID NO: 206 - DNA, 44 bp, Homo sapiens
gattggcggcactggctatcaaatcctcctacatccraaacaac

SEQ ID NO: 207 - DNA, 19 bp, Homo sapiens
ggggyggagttgagygtta

SEQ ID NO: 208 - DNA, 25 bp, Homo sapiens
cctaaaccataccraaaactcract

SEQ ID NO: 209 - DNA, 26 bp, Homo sapiens
tgtgagtttttgtggagggatagatg

SEQ ID NO: 210 - DNA, 26 bp, Homo sapiens
cracctcaacccacaaaataaataaa

SEQ ID NO: 211 - DNA, 21 bp, Homo sapiens
gggttcgttatgcgtttcgtc

SEQ ID NO: 212 - DNA, 23 bp, Homo sapiens
cccaaacgaaaaccacactacaa

SEQ ID NO: 213 - DNA, 24 bp, Homo sapiens
gtttggtgtttgggtttgttatgt

SEQ ID NO: 214 - DNA, 26 bp, Homo sapiens
ccaaacaaaaaccacactacaaaatc

SEQ ID NO: 215 - DNA, 25 bp, Homo sapiens
gygagggygttgttgttgttatygt

SEQ ID NO: 216 - DNA, 23 bp, Homo sapiens
actccccrcrctcrctcacctta

SEQ ID NO: 217 - DNA, 25 bp, Homo sapiens
agagaggtyggaagtgttgygagtt

SEQ ID NO: 218 - DNA, 21 bp, Homo sapiens
ccctccccacrcctaacctta

SEQ ID NO: 219 - DNA, 24 bp, Homo sapiens
gtggagattggygtygyggaagtt

SEQ ID NO: 220 - DNA, 25 bp, Homo sapiens
crtctacrttctcatcccrcaacaa

SEQ ID NO: 221 - DNA, 23 bp, Homo sapiens
tygtygggaggaatagyggttgt

SEQ ID NO: 222 - DNA, 25 bp, Homo sapiens
ccaaacrcrcacacccrttaactaa

SEQ ID NO: 223 - DNA, 22 bp, Homo sapiens
aaggaggtaaaggyggggatta

SEQ ID NO: 224 - DNA, 22 bp, Homo sapiens
aatcraacccrctaccctaacc

SEQ ID NO: 225 - DNA, 20 bp, Homo sapiens
ggagtgaaggaggttayggg

SEQ ID NO: 226 - DNA, 20 bp, Homo sapiens
ccracccraataaacccaac

SEQ ID NO: 227 - DNA, 24 bp, Homo sapiens
ttagaaygtttagggggtaggtga

SEQ ID NO: 228 - DNA, 25 bp, Homo sapiens
crccraacttaccttaacrccctta

SEQ ID NO: 229 - DNA, 25 bp, Homo sapiens
yggygyggtttagggtataggtaga

SEQ ID NO: 230 - DNA, 21 bp, Homo sapiens
ttaaattccctcccaaccact

SEQ ID NO: 231 - DNA, 21 bp, Homo sapiens
gtttyggatatgttgggatag

SEQ ID NO: 232 - DNA, 22 bp, Homo sapiens
aacacttaaaacrcacctaaaa

SEQ ID NO: 233 - DNA, 23 bp, Homo sapiens
gygggtgtagtaggtaattttag

SEQ ID NO: 234 - DNA, 23 bp, Homo sapiens
aaaacraaataaaacccaacaac

SEQ ID NO: 235 - DNA, 24 bp, Homo sapiens
ggagagggagaggtaggtaatgtt

SEQ ID NO: 236 - DNA, 25 bp, Homo sapiens
taataaaacccaaaaaccracract

SEQ ID NO: 237 - DNA, 25 bp, Homo sapiens
aggggaygaaattgttgaatttagt

SEQ ID NO: 238 - DNA, 25 bp, Homo sapiens
tcccrataccccctaaacaactata

SEQ ID NO: 239 - DNA, 21 bp, Homo sapiens
agtygatygggggttggagtt

SEQ ID NO: 240 - DNA, 23 bp, Homo sapiens
tcccatcctacrcccracracta

SEQ ID NO: 241 - DNA, 22 bp, Homo sapiens
ggygtaggatgggattyggttt

SEQ ID NO: 242 - DNA, 21 bp, Homo sapiens
racccraatccccctctacaa

SEQ ID NO: 243 - DNA, 23 bp, Homo sapiens
ccrcracrctcaaccaaccacaa

SEQ ID NO: 244 - DNA, 25 bp, Homo sapiens
gagygygagtygagyggaggagatt

SEQ ID NO: 245 - DNA, 48 bp, Homo sapiens
agcacccggatggcgtagatggagagagttagtttgatttagaaggtt

SEQ ID NO: 246 - DNA, 45 bp, Homo sapiens
gattggcggcactggctatctccccracctccttaataaaataac

SEQ ID NO: 247 - DNA, 26 bp, Homo sapiens
tggagggtgttgtttagtattgagta

SEQ ID NO: 248 - DNA, 27 bp, Homo sapiens
rataaccacctcraccaaataacrata

SEQ ID NO: 249 - DNA, 42 bp, Homo sapiens
agcacccggatggcgtagatttyggtttgggtygagttattg

SEQ ID NO: 250 - DNA, 46 bp, Homo sapiens
gattggcggcactggctatccrtcttccaccrtaacctaactaaaa

SEQ ID NO: 251 - DNA, 23 bp, Homo sapiens
tttyggtttgggtygagttattg

SEQ ID NO: 252 - DNA, 26 bp, Homo sapiens
crtcttccaccrtaacctaactaaaa

SEQ ID NO: 253 - DNA, 23 bp, Homo sapiens
ggttgggaaagatygtagtttgt

SEQ ID NO: 254 - DNA, 22 bp, Homo sapiens
aaatctctcccctcrtcctatt

SEQ ID NO: 255 - DNA, 23 bp, Homo sapiens
ygttgygggagagtttggttaag

SEQ ID NO: 256 - DNA, 27 bp, Homo sapiens
taaattcatttcraacccraaactaat

SEQ ID NO: 257 - DNA, 24 bp, Homo sapiens
agtatttagggtagygggtygatt

SEQ ID NO: 258 - DNA, 24 bp, Homo sapiens
crataccccrtaacrtatccataa

SEQ ID NO: 259 - DNA, 22 bp, Homo sapiens
gygtagggtttaggygatygtg

SEQ ID NO: 260 - DNA, 26 bp, Homo sapiens
aaatacccaaaacaataacractaac

SEQ ID NO: 261 - DNA, 23 bp, Homo sapiens
gtaaaagggttggtgagatttgg

SEQ ID NO: 262 - DNA, 25 bp, Homo sapiens
craaaaaatctccttacctacttcc

SEQ ID NO: 263 - DNA, 27 bp, Homo sapiens
ygtgtttagygggattgtagygagaat

SEQ ID NO: 264 - DNA, 21 bp, Homo sapiens
ccrccacctactcccraccta

SEQ ID NO: 265 - DNA, 21 bp, Homo sapiens
ttggtggtayggggtyggagt

SEQ ID NO: 266 - DNA, 25 bp, Homo sapiens
cctatctccraaacccacraaataa

SEQ ID NO: 267 - DNA, 22 bp, Homo sapiens
gagggttygggattttygattt

SEQ ID NO: 268 - DNA, 22 bp, Homo sapiens
craccccaaccrtatccrataa

SEQ ID NO: 269 - DNA, 16 bp, Artificial
  Sequence from bisulfite modified Homo sapiens DNA
tcgcggcgcggttatc

SEQ ID NO: 270 - DNA, 18 bp, Artificial
  Sequence from bisulfite modified Homo sapiens DNA
ccaccgacgctcaccgat

SEQ ID NO: 271 - DNA, 25 bp, Artificial
  Sequence from bisulfite modified Homo sapiens DNA
tggttttttttgtggtgtggttatt

SEQ ID NO: 272 - DNA, 23 bp, Artificial
  Sequence from bisulfite modified Homo sapiens DNA
caacaccaccaacactcaccaat

SEQ ID NO: 273 - DNA, 23 bp, Artificial
  Sequence from bisulfite modified Homo sapiens DNA
tattcgtggcgtatgtgggtatc

SEQ ID NO: 274 - DNA, 18 bp, Artificial
  Sequence from bisulfite modified Homo sapiens DNA
acacgcacgatcccgact

SEQ ID NO: 275 - DNA, 28 bp, Artificial
  Sequence from bisulfite modified Homo sapiens DNA
ggatatatttgtggtgtatgtgggtatt

SEQ ID NO: 276 - DNA, 24 bp, Artificial
  Sequence from bisulfite modified Homo sapiens DNA
ctaaccacacacacaatcccaact

SEQ ID NO: 277 - DNA, 22 bp, Artificial
  Sequence from bisulfite modified Homo sapiens DNA
ggtggggagttgagggtaagtc

SEQ ID NO: 278 - DNA, 23 bp, Artificial
  Sequence from bisulfite modified Homo sapiens DNA
cctacaacaaccgaaccataacg

SEQ ID NO: 279 - DNA, 22 bp, Artificial
  Sequence from bisulfite modified Homo sapiens DNA
ggtggggagttgagggtaagtt

SEQ ID NO: 280 - DNA, 25 bp, Artificial
  Sequence from bisulfite modified Homo sapiens DNA
cacctacaacaaccaaaccataaca

SEQ ID NO: 281 - DNA, 22 bp, Artificial
  Sequence from bisulfite modified Homo sapiens DNA
cgttttttaggtgtcggttttc

SEQ ID NO: 282 - DNA, 20 bp, Artificial
  Sequence from bisulfite modified Homo sapiens DNA
aacaacgaatcgattttccg

SEQ ID NO: 283 - DNA, 24 bp, Artificial
  Sequence from bisulfite modified Homo sapiens DNA
ggtgttttttaggtgttggttttt

SEQ ID NO: 284 - DNA, 24 bp, Artificial
  Sequence from bisulfite modified Homo sapiens DNA
aaaacaacaaatcaattttccaaa

SEQ ID NO: 285 - DNA, 18 bp, Artificial
  Sequence from bisulfite modified Homo sapiens DNA
tcgaacgtatttcgaggc

SEQ ID NO: 286 - DNA, 19 bp, Artificial
  Sequence from bisulfite modified Homo sapiens DNA
acaacgaatcgattttccg

SEQ ID NO: 287 - DNA, 19 bp, Artificial
  Sequence from bisulfite modified Homo sapiens DNA
ttgaatgtattttgaggtg

SEQ ID NO: 288 - DNA, 18 bp, Artificial
  Sequence from bisulfite modified Homo sapiens DNA
tcaattttccaaaatccc

SEQ ID NO: 289 - DNA, 28 bp, Artificial
  Sequence from bisulfite modified Homo sapiens DNA
aacgaattaataggaagagcggatagcg

SEQ ID NO: 290 - DNA, 27 bp, Artificial
  Sequence from bisulfite modified Homo sapiens DNA
cgtccctccctaaaacgactactaccc

SEQ ID NO: 291 - DNA, 32 bp, Artificial
  Sequence from bisulfite modified Homo sapiens DNA
taaaaatgaattaataggaagagtggatagtg

SEQ ID NO: 292 - DNA, 25 bp, Artificial
  Sequence from bisulfite modified Homo sapiens DNA
aatctcttcatccctccctaaaaca

SEQ ID NO: 293 - DNA, 18 bp, Artificial
  Sequence from bisulfite modified Homo sapiens DNA
gagggtggggcggatcgc

SEQ ID NO: 294 - DNA, 21 bp, Artificial
  Sequence from bisulfite modified Homo sapiens DNA
gaccccgaaccgcgaccgtaa

SEQ ID NO: 295 - DNA, 24 bp, Artificial
  Sequence from bisulfite modified Homo sapiens DNA
ttattagagggtggggtggattgt

SEQ ID NO: 296 - DNA, 22 bp, Artificial
  Sequence from bisulfite modified Homo sapiens DNA
caaccccaaaccacaaccataa

SEQ ID NO: 297 - DNA, 23 bp, Artificial
  Sequence from bisulfite modified Homo sapiens DNA
tttcgacgttcgtaggttttcgc

SEQ ID NO: 298 - DNA, 22 bp, Artificial
  Sequence from bisulfite modified Homo sapiens DNA
gcactcttccgaaaacgaaacg

SEQ ID NO: 299 - DNA, 29 bp, Artificial
  Sequence from bisulfite modified Homo sapiens DNA
tttgtgttttgatgtttgtaggtttttgt

SEQ ID NO: 300 - DNA, 28 bp, Artificial
  Sequence from bisulfite modified Homo sapiens DNA
aactccacactcttccaaaaacaaaaca
